United States Patent Application Publication US 2026/0191916 A1 - sequence listing, part 69

SEQ ID NO: 458 - DNA, 3280281 bp, Bacteroides stercoris (residues 1-1,640,141 of 3,280,281)
  source 1..3280281: mol_type = genomic DNA
tgattagttaattatcatgttattgtggatttattttaggaaggaaatgaaaaaggagttaagcagaaacttaactccttcatttttaccagtcggggtgactggattcgaaccagcgaccacacgccccccagacgcgtactctaaccgggctgagctacaccccgaattgcggatgcaaaagtacgtctttattttgaaatagcaaatacttctgtgattttttattgcctttattttacctttattttgaaattcgctgtttatcagtgttttcttattgttaaataaatctgaaatagtaggtgattgcaatatccggccggaaaaacggatgattctttggggcatattacctttttcttgtttatttatattagctttgtcatctcccaaaagcagttataaaccgtataaacaatatatttgatgatggatatacctaaattgcgcttgttgaaccagcagttggcgaatcctttgtttcattctccgaaagagttggtgtcctggatgggagctgtccaggcacaggattatgcaatggctaaatgggcggtgggtatgcgcctggcttcggccactgtccggacggtggaagaagcgttgcagaaaggagagattttaagaacgcacgtaatgcgccctacatggcatctggtggcggcagaagatattcgttggatgctgaagctctctgcccggcgtataaaagctgccaatgaggcatacgccaaaggcagggaagagatatccgaggaactttacagtaaaagcaatcgtgcattggaaacgattcttgccggaaagaaaaggctgaccaggctggaaatagcggaacacttccggcattcggggctggtggcggacaactatcatatgacccgctttatggtacgggcggaagtggaaggcatcgtttgcggaggagagtctaaaggcggaaagcatgcttacatgcttctggaagagtgcgtgccacctgtgccggacataacgaaggacgaggctctggcacgtttggcaaggaattatttccgtagtcatacccctgccactttacaggattttgtgtggtggtccggactatccgtaacggaagcgaaacaaggtatatacctgataggctgtgaattgacggaagagcagtggaaagggcagacctggtatcttcatgagtccggcagaacccgcggcaacataaaagggcatatacggtttctgccgccgtacgatgaactgctgctgggttataaagaccggacggatgtgctcccttccgaacactattccaaagcttttacgaggaacggactgttctttccggtaatactttacgaagggcagattgttgggaactgggacaggaaggttaaaagaaacggatgcggcccggggtgttctctcttccggcaggaaagccgcatagatgaggctttattggacaaagcacaacagcagtatatgcagtttttgggaaagtgagggatttatacccccatacattcccggtaaaagtcgaacacctcgaaaatcgtttctttgtccgccgtctggttcaggcagatatcgcctacctctttcagcagcgtgaaattgatgatgccggcagtgtttttcttgtcatgcaacatcagttcgtaaaggctgtcgtattgcttgcagctaaaggcgaaagcaccgtaattctctttgataaattggatggtctggcgcattttatctttaggaaagccggctttgaggtaggagaggtaaagttcgcacacaagtccccacgccacggcataaccatgcagtaccggacggttttcggccagggcaagactctcgaaagcatgtcctatggtgtgtcccagattgagcgccttgcgtatgccgtgctctttggggtcttgttccacaatatcttcctttacctgtacggagcgccctaccattgtcctgagtgcggagtagtctatgttttctgtatcgaaagacagcagttccgccagatggtcggaagtgctgatgagtccgtgcttcaacatttcggcatagccggagaaaaagttgcgggcatcgaggctgcgcaggaacccggtttccagcaagacggaggaagcaggggcgaagacaccgatttcattcttcagtccgttgaagttgatgcctgtttttccgcctacggatgcgtctaccatggcaagcagggtggtagggatgttgatgtatgcaatgccgcgtttgaaagtggcagccgcaaagccgccgaggtcggtgaccattccgccgcccaggtttatcaagagcgaatggcgggtggctccctgttcgctcagagcctgccacacggaagccagcgtctccagatttttgtgcacgtcttctgctccgataatgatttcggcggcattttccagcgcggggatgctttgcagttgcggcaggcaaaggcggtgtgtatgttcgtcggtaaggatgaaaagcttgtcgtgaggacattttccgatggcatgcgtcaggtcgttttccaactccttgcagaggattacttcttgtttactcatttgacttattacggattagaagttgtaaattatggaagggagcattgctctctttatttattatgctacaaagatagttctttcaacaataaaacgttatctttgtttccgaaaatctatgtatttgtaaggtgtccgcaccgtaacctttaatttgtatgtaagaaaatgaaagctttacttcccgtatactgccgtccgttgggctatttcgtaattgcgctggccttgttccttccgttcctgatgatgctgacgggcagggttacagatgccaatctgctgttttataaagagtgctccaaactcctgatgatgctgggggcattgatgatactctttgcgctgacgaaaggcgaatgcaaggcgacagaggagatacgcaacaaagccacgcgcaatgcgatgttccttaccgtgctctttattttcggaggcatgctgtacagggtggcgcagggcgatattatgtccgtcgattcttcttctttcctgatattcctgattatgaacgtcctttgccttgaattcggcataaagaaagcgaccgtggacaacctgttcaagcggaataaccggtaattaaacaaaatcattctgtagcccgttaaaccttttgcccgtacttttgtcaaaagaatcagttacaaataaacagtgttgattatttagaagacagggcatgaaaaaaattatcactgcggcggtgctgttgctggcaacggcattgtctgctttttcacaaaccaaaaacatcaccgtatccggccgcgtgcttgaagacacgaacgagcctgcggtgcaagctaccattcaattgctatcgttgccggacagcgcttatgcagccggtgttgccactacgggaaacggctactttaccctgccgaaggtgaatgcggggaaatatgtgctgaaagtttcctatataggttttaagaataagtttctaccgctgcatctctatgccaacgtgcgcaataaaaatgtgggtacgataacgctcgaaacggatgccattatgcttgccgaggctgtggtagtggcggaagcgccgcaagtgcaggtggtggaagatacgctgatgtacagttcctctgcctatcgcacgccggaaggggcgatgctggaagaactggtgaagaaactgcccggtgcggaaatcgatgatgacggcaatgtgacgattaacggcaaggagctgaagaaaatcatggtggacggcaaagagttcttcgggggcgatataaagacgggcttgaagaacttgccggtggatataattgataaactgaaaacctacgataagaagtccgacctggcacgcatcaccggtatagatgacggtgaagaggagacggtgctcgaccttaccataaagaaaggtatgaataaggggtggttcggcaatgcggatgtggcttatggtacggaagaccgttatatggcacgcatgatggtaaattacattgtcgataagacgcaattctctttgattggttctgccaataatgtcaacgaccaggggttctccggtggtggcggcggtccgcgctggcgcaggaacaacggtttggtagccacgaaaacactgggagcgaactttgcgacggagacttcaaaactggagcttgacggtagtgtccgctatgattataaaggtgcggacattatcagtaccaactcttcggaacgtttcctgcagaacggaagttcatactccaattcgaacgctgtcaacaagaacaagaattcggatgtctttgccaacttccgtctggagtggaagccggattcgatgacgaatatcattttccgtcctaacttctcttacggcaagacaaacggtacttccggttcggaatcgggaacattcaactcggacccgtatagcctgattgccaacccgaacgattttctcgacttcgacaagctggaagacgaccctttggaaaatatccgtgtcaatgcaacgaatgatgcttctctgaccaaaagcaaaagcatttcgacatccgccacgctgcaactcaacaggaagctgaataaccgcggacgtaacataaccttccgcggacgcttcagctacggcgacaacgacaacgaccagtacaggcagtcggaaacccgctattaccagatattgaacgcgttgggcggcgactccgtgctgtatcgcaaccagtatatcacaacacctaccaacaattataattatagcgctcaggttacgtacagcgaaccgattgcacacgccactttcctgcagttcagctatcagttccaatacaagtacagtgagagcgacaagaccacattcgatatgctggactatccggagtgggacatcaacgggcctttgccgtccggatacgagtcgcatgccgtggatagcctgggcaaatatgcggagtacagatactacaaccacgatgcgtccgtgtcgttgcgcttcatccgtgagaagtatcagttgagtgcggggatgtctttccagccgcagcattcggtattgtcctataagcgcggggattatatgattgatacggcccgaaacgtattcaactttgccccgaacattgatttccgttaccgtttttctaaagtgagccagttgcgttttatgtatcgtggacgcagcagtcagccgagcatggagaacctgctgcctattgccgacaactcgaatccgctgaacatcagagtcggaaatccgggactgaagccggcatttacgcacaatatgcgcctcttctacaatacttataatggtgagttgcagcgcggaatgatgacacatctcagcttctcgaccacgcagaacagcatcagcaacagtacggtgtacaacgagcaaaccggcggacggaccactacgcccaagaatatcaacggcaactggagcgctttcggtatgttcggattcaatacggcgttgaagaacaagaagtttacggtaaactctttttcgcaactcagatacaataacaacgtggcgttcctatacgatcagaatacgaaacaggataacaagaataccaccaccgaacttatgctgagtgagcgggtgaacggggcctaccgcaacgactggtttgaattcggagtgaacggttcggtttcctatacggcagagcgcagcaaattgcgcccggagaataaccagaatccctatactttctcctacggtgcgctgaccaatatcacgatgccctggaagatgacgctttccaccaatatcaccaatcaaagccgccgcggctatacggacagcagcatgaaccgcaacgagttgatctggaacgcgcaactttcgcaatcgttcctgaaaggtgcggcgactgtgagcttcgagatgtacgatatcctgaaacaacagagcaacatcagccgctcgttgacggcggatggccggtcggtgtcgtcttataatggtgtcaacagctactgcatgctgcatttcatttaccgtttgaatatttttggcggtaagggtgcgcgcgaaagcatgcgtggcaggcaaggcttcggcggtcccggtccgggcggccaccggggtggctttggcggcgggcggcgtccgttctaatgttaatcaatgtaataggtcgtaaaacttccttcctttttcatatatttgttttaaaatctgttttgatttttattcgggacttatttcttcttgtgacaaatgtatgcttgattggaacttcatagccggcctgattgccacagtagcattcgatattatctattttggcgcaattatcggaacaatcacggttatcattctcgataaccggaatccggtaaagacaatggcgtggatattggtgctgatgttccttccagtggtgggactggtgttttacttcttcttcggccgcagccaaaggcgggtgcgtgtcattggcaagaagagttacaaccgtctgttgaagaagccgatggccgaatatcttgctcaggattcctgtgcgcttccggcaaattacggccgccttatctctctgtttcgcaacaccaaccaggcttttcctttcgatggaaaccgtgtggaagtctatacgcggggactttccatgattcaatccttgctgcgcgaattgcaaaaggcgaccaggcacatccacatggagttttatatcttcgaggatgacgccataggccgtatggtgcgcgatgtgctgatggagaaagcgaagcagggagtggaagtgcgtgtgatttatgatgatgtgggatgctggcatgttcccaaccgcttttatgaacagatgcgcgaggcgggagtggaagtgcgcagtttcctgaaagtacgttttcctttgttcaccagcaaggtgaattaccgcaaccaccgcaagattgtagtcattgacgggcgcgtgggctttgtaggcggaatgaatctggccgaacgttatatgcgcggcttttcatggggcatctggcgtgatacgcacctgctgctggaaggtaaggctgtgcatggcctgcaaacggcttttctgctcgactggtattttgtagaccgtaccttgattacgtctgcccgctacttcccgaaggtggatgcctgcggcacttcactggcgcagattgtaacggccgaaccgataggtccctggaaagaaatcatgcagggacttgtcatggcgataaccggcgcccggaaatacttttatatacagactccttattttcttccgacggaagccgtgctcgtagccatgcagacggctgcactggcaggggtggatgtgcgtcttatgctgccttatcgtgcggataacaggctgacgcatctgggctcctgctcgtatctggcagaggcgttgcgtgcaggtgtcaaggtgtacttttataaaaaaggtttcctgcactccaaactcatggtatcggatgacgaattgtccacagtaggctctacgaacgtggatttccgcagtttcgagcataattttgaggtgaatgcctttatatacgacaccgagaccgcattgcagatgcgtgagatattcttgcaggatcagcgggaatgtgtgcaggtattctccaagaattgggagaaacgtccctggcaccgtaaggcggcagaaagcatagtgcggctgctggcaccgttactgtagctttcagccttgaatgccgaagaaagagaaattgacactgccgtagattcttctttccaaaaagcagggatgttcctcgaagttattggtttttccatgctccagcacgaacaggccgtcttctttcagcaggttgttgtcgaaaatgaggtcgggcagggtttcaagctctttgagtccgtacggcgggtcggcaaagataaagtcgaaccgttcgcggctgccttgtatatatctgaatacatcgccgcggacaggcaggcatttgtcggtcttgagttctttcattaccttgcagatgaaagcgtaatggtcgcggtctttctctacgctgattacctggtcgcagcctctggacacaagctcgatgctgatgctgcctgtgccggcaaataaatcgagtgcgcgtacgccttcttcaaagtccatgtagttggacagtacattaaacagattctctttggcgaaatcggttgtggggcgtgccttgaaagtatggggcacgtcgaaacgccttcttttgtatattccgcttattactcgcataggttgatagcttgtaggtcgagattggcggcagggttcatgatgaatacctgccggataaattttttcagttcgggcagcagttgctctttgtcgtacagttcgccggtgaggtggagctcgtcgcgttcctgcgccatgccgagctgcttccatacacagagaatgtaatagaggcggtcgtttgtctccttgcaggcaaaggtgttggcgaatgccagccggccgcgttcgtaggcgtatatctctgccgcttctttgcgcaggtgcacatacattttccggcaattgcccaggcggctctttgccgcaaagtactctatgagagggcttgcctgcgcatagaaacggacgtcgggatactgttcgcgtaaaagggagcaggcgcttttgtccattccaaacagtacgactatattgttcttatgcaagatgttgtattgcaccagttcgttgtcttgtctggagtgattatgatagaatacggtttccgcctgttcgtcctcaaagaattccaacggaatgaatgtaaagcgcttgcctgccataaggacattgatacggcggaaaggattcttcagccagtccgtttcgcggaaagcctgtttcaggttggcagtgagggacagggaatcgtccactccgtgcttgtggaaagaaaatctgccttcgccgagcggattgaatatagaaaaagaaaatccatccgtactcagacggatggataaggtatattgttccgatttactaaaatcagtcgtttctatcatacgtattgtgtcggtggattattcccagttaccggcgttgttgttggctgtttccaggctaccgatcatcagacctgagtatttgcccaacttggtttgaacatctttcaggttagcgatttcctgtttgtcgagaccgttcagatatacttcatacggagtcttgacttcgagcaggcagaaaggagcaccggatttggcagtatcgttcttgatagccatttcaaactgtgcaccgttgccgaaaggaacatatctcatagagtcggcattgaagcctttcgggaagatagtatccagcacggctacccacatggtatcgcgtttgaagttttccaatccccatttcttgacttctgcatagttgcccgtctttttggccttattgatgatgttgatagccttcttttcagtcaagccgtcttccaactgcttgtcgtccaattcaccctgcttgaagataaacggaagtttctgattctttacgaagtcaatcaacgtatcgaagctggcagtatattgctggttgtgcaaaccacggtattccaactgcgctttacgaatgtcgataaggcgggcaattactgctgcgtctctttgtttcttggctttttcaaagtttataggacccatgatgctggcatagcagatgtaaaccaaagccagggcacacaagcctaaaacgatattaaaaactgttttcatgataaatatgttttttagttgttatattcgcaccgcaaaaataaaagaaataaatttaaaaacgacagttcccgttacttttttctcttacaaaaatgataaataactatttagaaaggcaaattaaggaaaattttccttatcaaccaactccggagcaggaaattgctataaaatctttgtcggacttccttcttgcgccccgtagtgagacggtttttctgcttcgtggctatgcaggtacgggtaagacctcgctggtgggcgctctggtcaggactttggataagctgcaacagaagtcggtattactggctccgacggggcgggcggcgaaggttttctccgcttatgcgggacatccggcgtttacaattcataaaaaaatttatagacagcaatctttttccaatgagacgggcaacttttcggtgaacgataatttgacaactcatacattatatattgtcgatgagtcgtcgatgattgccaatgacggtctgtcgggttcggcattcggcacggggcgtttgctggacgacctggtacagtttgtctattcgggtatgggatgccgccttttgctgatgggagatacggcacagcttccgccggtgggcgaggagcagagtcccgctctgtttgcagatgccttgaaaggctacggactggaggtgcaggaagtggacttgacccaagtggtacgccaggagcagcaatcgggtattttgtggaacgctacgcgcctgcgccaactgattgccgaagatgcctgcgaggctctgccgaagataaaggttgcggggtttgccgacatcaaagttctgccgggcgatgaactgatagatgcgctcgaaacgtgttacgaccgcgacgggctggacgagacgattgtgatatgccgctccaacaagcgtgccaatatctacaataacggcatccgctcccggatactctggcgggaagatgaactgaatacgggcgacttgctgatggtggcgaaaaataattattactggacggaaaaacagaaggagatggactttatagccaatggcgagacagcggtggtgcgccgcgtgcgccgcacccgcgaactgtatggtttccgttttgcggatgtcacactggaatttcccgattatgacaacttcgaactggaagcaaatcttctgctggatacattgcacagtgatgcgcctgcactgcccaaggcggataacgaccgccttttctataccgttctcgaagattatgccgacatcaccgtgaagcgggaacggatgaagaagatgaaagccgacccttattacaatgccttgcaagtgaagtatgcctatgccgtgacgtgccataaggcgcagggcgggcagtggaagaatgtttttctggaccaggggtatatgacggacgaatatctgacgcccgattatttccgttggctttatacggcatttacccgggccacgggcactctctatctggtgaactatccgaatgagcagatctgctgaaaaagagacggataatgatgcagtattccgttattttctgtatttttacagatagaacaattgttatctgacgattatgaagaaacagtattttcttttgactttggcatggttgctgtttgccgtttccggctgtaaggacgattatcgcagtgtggtgctttttgagggtgcggaaccggtttatcaggttggaacatgtgataatctggtctcgtctctggctttcttcctctctgaaaccgaaggggaaacggtgctcggcatagacggtggcgatggtgcttataccttgacgaatgagcatgaatcggtggcttccgtaacgtttgcgggtgatagcaacggttacaggcgtataagcatacagcctttggcggcgggagaaacggtagtgcgggtgatggacggttccgggtccggtgcgcaattgcgcattacggtgaaagagcgtcgggaatataagatgtcgaagcagggatttgagtatggaatcagcggcgatgcgcccgtggaactgttgggtaaggtgtcggaagaactctccggccgttcctggctggaagattccggatattatgtgttgatacccgacaagggctcttcctattacctggataagggagtgctggaaatctatcctacggggaaggaagatgcacctcttacgggaagttacgagacagttccgatggcaggggaagacggggacgtacatgcgctgtggcggtttacttatgacggagagcagagaatctttacgcgaagccttgccggaagtgacggagtggctacggcgatatgcgtgcttgcagagaatgtaaccccgttctgttcgcccggactgctgcctgagggggtgacggtcatttatcgcgagcacttcctgttgaagttggaatagaatccgggacctttcgggcaggagttgcaagcgggaaaaacaaaaggagaagcgatggcttctccttttattgtaaattgaagttgaaatatctgcctctccggcaatcttacggattataatcctgccagttccaggactttgtctacggctgcgttcaagccatccgggttctttccgccggcagttgcaaagtggggctgaccgccgccgccgccttgtatcagcttggcggcttctttcacaaggttaccggctttcagtccgccggctacgaggttgtcgctcagcatcactgtcagcatcggtttgccttcgaataccgttcctgcaacgaagaaaaggttttccgtaatctctccgcgcagttggaatgcgatgttcttaaccgtgtcggcgggtatcatggctgcacagaacttgataaccttcgtaccgttcacctcttggatattctgtagaagtttctctttcagttgtgcttctttctctttcatgaaatcttccacctgtttcttcagaccggcgttctcttcgatgtatttgcggatggcgcctgacaggtcgggagcgttgttgaagagtgctttcaaatcgcgcatcgtatcctggaaggcatcgagcatctcctctacgcgtgctccggtataggcttcgatacggcggacaccggcggcaacggaactttcggatacaatcttcatcattccgatgtttccggtagcggctacgtgcgtaccaccgcagaattcaatggaagaaccgaactggatgacacgtacacggtcaccgtacttttcgccgaaaagagcgatggcgcccagttccttggcttcttcgataggtatgttgcggtattctttcagagggatgttggcacgtatcttggcattcacgatgtgttccacctggcggatttcctcgtccgtcactttttggaagtgcgagaagtcgaaacgcaatgagtccggagtcaccaaagaacccttttgctctacgtggtcgcccaatacctcgcgcaatgcggcatccagcaggtgggtagcagagtggttggcggcgcaggcggcacgtttgtccgtatctacacatgccatgaacggtgcttccaggtgttcgggcagcttcttggtgatatggataggaaggttgttctcctttttggtgtcgatgacttcaatcgtttcgaactcattgaccagtacgccggtatcgcctacctgtccgccgctttcggcatagaacggagtcttgtccagtacaatctggaacagtgtctggttcttttgctttatctggcggtagcgcagaatggatgtctcatattccgtatagtcgtagcctacaaattcggtagtgccttcttgcagtgtaatccagtctccggtttcaacggcggcggcattgcgtgcacgttgcttttgctgctgcatttcggcatcgaactctttaatgtcggcagtcatgccgttttcgcggaggatgagttcggtgaggtcgagcggaaagccgaatgtatcatagagcgtaaaggcgtctttaccactgatttcggtcttgccggctgccttggcatccgccatggtcttatccagcagacggataccggtctccaaagtacggaggaaagaatcttcttcttctttaatgactttggctatcagctctttctgtgcattcaactcggggtatgcgccgcccatgttctcgatgagtacgggcaacagcttgtacatgaaagcctgcttctgtccgaggaacgtgtagccgtagcgcactgcacggcggaggatacggcggattacgtaacctgccttagcattgctcggaagctggccgtcggtgatggagaaggcgattgtacggatgtggtcggcaattacgcgcatggcgatgtcctgctgttcgtttttgccgtatgtggctcccgtcatgtcgccgatggctttcagtatcggttggaaaacatcggtgtcgtagttggaagtcttgccttgcagtgtacgtaccaggcgttcaaagcccataccggtgtcgattactttggcgggaagtccttcgaggctgccgtctgccttgcggttgaactgcatgaatacaagattccatatctcgataacctgcggatggtctttgttcaccagttgcgaaccgggtactttggccttttcttcttccgaacgcgaatccacgtgaatttcggagcacgggccacaaggtcccgtatcacccatttcccagaagttatcgtgtttgtttccgttaaggatatggtctttcggcaggaactgttcccaataggaagcggcttcgttgtcgcgttccaggccttcttcggggctgccttcgaatacggtggcgtagaggtctttcgggtcgagcttcagcacatcgaccagatattcccatgcccaggaaatggcttctttcttgaagtagtcgccaaacgaccagttgcccagcatctcgaacatggtgtggtggtacgtatcgtgccccacttcttccaggtcattgtgctttccgctgacgcgcaggcacttctgtgagtctgccactcttttatatttcgccgggtgattccccaaaataatatctttaaactggttcatacccgcgttggtaaacatcagcgtggggtcgtccttaatcaccataggagccgaaggcacaatctggtgacctttactttcgaagaaactcttgaacgagtctctgatttcatttgcagtcaacatacttcttatttatgatttatgatttccgatttacagcttgcgatttatgacttacgcattctatgacccatctttctatgaaatcataaatcataaatcataaatcttataattcttgaaaaaactgtgcaaagatagcttgtttttcgtatttttgccgcattgataatgaaatatttactctcgatgcgcaaagtttactacatttataatccgcggacacagacttacgaccgaatttatcctaccgtccggcaacgggcgttgagcatattgcgccggttgtttttcggtatggggttgggagccggcagctttatcgtactgttgctgattttcggttcgccgtccgagaaggaactgcggaaagaaaacagccggcttcaggcgcagtataacgtcctttcgcggagaatggacgaggctatgggagtattgcaggatgtgcagcaacgcgatgataatctgtatcgcgtaatattccaggccgaccctattccctcggctatccgtaaggcaggatacggcggtacaaaccgttacgaacatctgatggatatggccaattccgatttggtggtgaatactacgcagaaaatggatatgctcacgaagcagctttatatccagtcccgttcgttcgatgatgtggtggagatgtgcaagaaccatgatgagatgctgcgttgcatccctgccattcagcccatttccaataaggatttgcgcaagaccgcttccggttatggaacgcgcatcgaccctatttacggaactacccgttttcatgccggcatggacttttcggcccatccgggaacggatgtatatgcaaccggtgacggcactgttgttaaaatgggatgggaaaccggttatggaaatcttatcatcgtggatcatggcttcggttaccagacgtggtatgcccacttgcagggattccgtaccaaactcggcaaacgggtggtgcggggcgaggttatcggtgcggttggaagtaccggcaaaagtacaggacctcacctgcactacgaagtgcatgtgaaagggcaggtcgtaaatcccgtgaattattactttatggatttaagtgccgaagattacgaccgtatgatacagattgcggcaaatcatggaaaaatgatggattagcggattatgaatgtttaactgacaggctgttatgctgaataccgataaagaactgaaactatattactccatcagcgaggttgccagaatgttcgatgtcaacgaatcgctgctgcgtttctgggagaaggagtttccgcagctcagaccgaagaagggagggcgggggatacgccaataccgtaaggaagatattgaaacggtgaagttgatttatcatctggtcaaggagcgcggcatgacgctgcccggcgcacgccagcgcatgaaagacaataaggaagccactctccggaattttgaaatcgtagagcggctgaaaagtatccgtgaagaacttatcggtatgaaagaatccctcgatgcctttacttatgaggatgtagaggcattgaaagagaatcttatgaaggaacagcccggataggggttatccttctattcttgtcacctgtttgatgttctgtatctgtttcaggttgtcgcagatgctgcgtacatcgtccacatcgtgtacgtaaagttgtatcttaccttcaaaaataccgtcggtggtttcaatcgtcagcttgcgaatattgacattcagctggcgggagatgacctgcgttacttcgttcagcaatcccatactgtcgatacctttcagataaatcgtcacgaggaatgacaactccttgtgggtgtcccattcggtggcgatgatacggttgccatagctgctcttgaggcgtgcggctaccggacattggcgtttgtgtatgattatccggttctgctcgtctatatatcccaatacatcgtcgccggggatggggtggcagcagtcggccatgatataattcttctggatggtctcttccgtcagtttcaatatctgcttggtattgattttttcttgcggaactttctcttcggactgctccttcgtgtctttgttgtctttattgccgaacgagaaagtcaggaactttttccagttggtgctttgtttttccttgaaggcgttccggtccgcatcacccaatacgagtttcttgctgcccacagcaacgaacagctcgtcgcgggtatggaaattgtgcaggcgggtgagcttgtctattgcggagtcatccatgcgtatatcctcgttcctgagaaagtctgcaaggattgcctcgccctctttctgatgcgctttcgcttctttgcgcaggatggatgcgattttggcacgggcacgggcggtagtggcataagcttcccattccggttgcacgcgttgcgatttggatgtaagaacctctacctggtcgccgctctgcaacttatggctgaggggaacaagcttgtggtttactttggcgccgatgcaatggctgccgatgtcggtgtgcagggagaaggcaaagtccagtgctgtggagttctgcggcatggtcttgatttcgcctttcggagtaaacacaaagatttccgaagcaaacaggttcagcttgattgtatccagaaaatcaatggcatccggttgggggtcatcgagtatctccttgatagtacgcaaccatttgtccagctcgccctcatcctcgctgccgccgccttccttatacttccaatgtgcggcgaatccctgttcggcaacgtcgttcatacgttcactgcgaatctggacttcgatccattgtccgttattgcccatgagggtgacgtgcagggcctgatagccgttggctttcgggtggctcacccagtcgcgcaggcggtcgggatgcggtttgtatattttggatatggatacgtatatgttgaagcagtcattcagctcttcttccatgttgcggggctcgaagatgatacgtacggcaagcaggtcgtagatttcctcgaacggcacatgctttgtctgcatcttgttccaaatggaatagatggatttgatgcgggcaaggatacggtatttcaatcccattttatccagttgggcacgtatcggagcggtgaactctttgaaaaccttgtcgcgttctacggctgtcgcttcaagtttcttttctatctcgcggtattcttccggatgctcgtaacggaagctcaggttttccagttccgtctttatcttgtacagccccagccggttggcaagcggcgcatagatatacaatgtttcaccggctatcttgaactgcttgttgggcagcatggaaccgagtgtgcgcatattgtgcagccggtcggctatctttatgaggataacgcggatgtcgtcggacatggtaagcagcagtttcttgaagttctctgcctgcgccgaggcgcggtcgccgaagatgccgcccgagattttggtcagtccgtcaacgatttgggcgattttggggccgaagatgttttcgatatcctcaacggtgtaatcggtgtcttccaccacatcgtgcagcagggcggcgcagatggaagtagaccccagccctatctcattgcacacaatcttcgctacggcgatggggtgcatgatatacggttcgcccgagcggcgtttgattcccttatgtgcctgattggcaaaattgaatgccttggttattatttcgacacgcttgcggtgtttggttgccaagtaatcgttcaacagttcctggaatgcctgttcaatcattgcttcttcggctctctctttctccttctggcttacgctctcttccatatactgtttctcctttcttcttcactttttgcaaaaataagcaattttcaacaccggacaagcatttatgtttttatttgtaaatcttcagcctctttcccgcattgattctggtgcttctcaatccgttccagctttttatctggttgacggtgacgccatatttgcgggcgatggtcgacagggtttccccgttgcgtattctgtggtaggtgacgtcgccctgtgaagaacttttccctttgctgctacgtgctgtgctgcgggtattggccacggaaacagttctgcggtttttaaacagttccgcactgcggtgggcgtaaatcgtgtcttggctgtcgatgaaagtgctgatgtagtttataggcagacggagtgtctgaggcttgctgtctcccggaatgatattcttcttgtactggggattcaggcttttgacctcatccattccgatgccgcaaacatccgtgatttgttcgaaatgcaggttgcggttcacctgtatggtatctgtggcgtccggaatattggtttccatcgggcagatattgtgcttgcagtagtacgtcattacgtagttggcggctataaaagcgggtacgtatccgcgtgtttctttgggcagatagttgtatatttcccaataatccgttttgccgcctgcgcgccggatggctttgttgatggtgccggggccgcagttgtaggcggcgattaccaggttccagtcctggtagatggcatacatatctttcaggtagcgtgcggcggcccaggtagccttaatcgggtcgcggcgttcgtccacaaggctgttgctttccaggccgtatatcttgccggtgttcagcatgaactgccacaggccggaggctccggcgcgggatacggccgagggattaagcgcagactcgataatcggcagatatttcagttccagcggcagcccgtaagtgtcgagcgcctcttcgaaaatgggcatgtagaagttgcaggcactcagcatgaaagccacctggttgcggaggcgtccggtatacatgtcgatgaatttgcgtacaatctcgttgtagggcatctccataatggtcggcatgcgcgagagccggtcgatgtatacggaatcgctgaattggggattgacggtagaggtgctgcaatcctttcctaaatctatgtagttcttggctttccagtcgctgagcaggctgtctacagggtaggtcatgctcttgggcaggtcgatgacttcccgccgttccgttccgttttcgcggataatgacatctacgctttcttgggcgtatgcttgcggagttgccagcagtatgctgaacagaagtgaggaacccgcgattattcttttcatatatgtaggtttatttgtcatggataaatctgtttatttgtttttaaaatcggaaactgcattgcaaccccacggagcggttggaggagttgtttatccggttgtcgatgacagccggctccactttcatgctgaggtcgggggtgatgtcgaaattggacagttcggcatccacataggcatcgatgacggacagcaggtatactccgatgaaagcgaagatacttaaatcgcggtatctgcgataggtatccttgcgcttgcgcaacagctctttcaactgggtttcggaaatcttgtatccgggcggcagcaggtcggtgatgctgctggactgcatattgccgttcatcgcgtctttatatgcggtggagtagtctttgtacattttgctgttccacgtcaaggcataggcacatccggcaaagccgccgtagaatatgggcaatttccagtatttccggttgtagatttgtccgccaccgggaattacgagcgccagccaggtggcttttgtagggttgggaacccatattttctgatcgatttcttttttgaggctgtctgccggcacttccgattctttcaggacgggagcggaagtcatttccagcagctttttcttgttctcggcggcaatgctgtcggcagtggcaatgctgtctgccggggcaacggcctggagaggcggcacttctttcatagtccggttcaggctgtcggcctgcatccgcgctgcttgccgtacggcggcaagagagtctgcctgcagcctgtgtatcctctttgcggcggcacgcgggcggctctgaccatacatagcaatccctgccgtctgcatcaggcaaagcagcagggcgatactgatttgatatattcttctcttctttgtcatttattttttcagcgtatcgagaataccgatgatacgttccagttcttcttcgttactgaacgggatactgatttttcctttgcctttttcggagcaggtcaactgtactttggtgctgaagaaactggaaagctgctgcttcagcatattgaactcttcgggcagtttggcgcgcttgggggctatcttgcggccgccgcttttcacggcttctccttcgctcagggatttcacgatttcctctactttgcgtacggaataaccttgttcgagtatctcttcaaaaatcttcacttgcagtttggggtctcccagtgttaccagtgcacgggcgtgccccatgtctatctgcttgttttgcaatcccatctggacgggagccggcagtttcagcaggcgcaggtagttggcaatggtggtacgcttcttgcctatgcgttcgctgaggcgttcctgcgtcagtccgtattgttccagcaggtgctggtaggcaagcgctatttccacggagttcaggtcctcgcgctgtatgttttcgatgagtgccatttccatgacattctcgtcgtcggccgtgcggatataggcggggatgctcgtcagccctgccatttgcgaggcgcggaagcggcgttcaccggcaataatctggtattcatcatcggacagcttacgcagggtgataggctggatgataccaatctctgcaatagaatcggcaagctcctgcaacgctgtctggtcgaactcgcggcggggctgattggggttgacggcaatcttcgacaattctatttcattgatagaggaagagccttcggtttgcacctcatccatggagagcagggcgtccagcccacgtcctaatgcatttcttttctgtaccatctattcttttctgttttacgatttactgtttactatgtttgccatgcgggcggttagtcctcgttgtggctgattaactcttttgccagtgcgatgtggtttttggctccggtggagtccgcatcgtacaggattgtggggagtccgtagctgggggcttcgctcagttttacattgcgctggatgacggtgttgaacaccagttcctggaagtggcgtttcacctcgtcgtatatctggttggcctggcgcagccgcgagtcatacatggtcagcaggaatccctcgatttcgagtgcggggttcagcttggacttgatgattttgatggtgttcagcaatttgctgatgccttccagtgcaaagtattcggcctgtacgggaatgataaccgagtcggcggccgtgagcgcgttgattgtaatcaatcctaacgacggtgagcagtctatcaggatataatcaaactcttcccgtagcggggcgagtacctctttcagtatcttttcccggtttttaagattgagcatttctatttcggcgcctaccagattgatgtgggaggaaataactttcaatgtatcaatctccgtgtcgtggatagcgtcgcgcacatcggcgcggtctataatacattcatagatagtacattctgcctgcttgatgtctacgcccaaccctgacgaggcatttgcctgcgggtctgcgtctacgacaagcactttcttttcaagtgtggcgagagaagctgcgaggtttatggttgttgttgtttttcctacaccacctttttgatttgccaaagcaattatttttcccataatttcaatgtttattggcagcgaaataagtgataattccgtatagcacctactaaaaaagagaaagattgcaaaaacggttgataagtcaccctttttgttaataactcccggatgccttctaccgttccgttgcctgaagacgtgtgtctcaggcactctttttcctgattagtggggcaaatatacgtatttatcttgaaaagaaacagcttttttgtctcacttgcagaagattaagatttctaaagcaatgagatggcgggcggcgggatgttccggtgataagctgccgcggctgccgtgtccggggaaatgcgtgccgtttctccggagtttacaatagtttgtccgaattaaactcggagtttattcctattaaacttcgggttcattaggattaaacctgaagtttaatggggataaacttatgttaaagcagtgccgatgcaaactcccatgcgaagtatccgcacaacacgcatttcagtaccgtgccgaagaggaagccgaacagggagcccagtcccgacttcagagcctgccgggtttccctgccgccgaaaagttcgccgataaaagcccctaaaaacgggccgagtacaatgccccagggcatgaagaacagcccgatgagggttccggcaaggcatccgcgtgttccccagcgcgttccgccgctgtatttgctgcccagcatggggacgaaatagtcgagcacctgtacgatgacgacaatcagcagccacagcaatagttgggtggcagagtactgcaccttgtcggtgaagtgtagcagcaacaaaccggcataggccacgggtggaccgggaattacgggcagaaagcagcctgccagtcccgttatcaggcagaggatacccatcagaatgagaaagacgtctaacatatctttttgtgtattggtggttaatatgtggttctcttttgctaaatttgtagcaaaattaaaaagaaatatggaaaatcagagacctttgatattgatttccaatgacgacggtatcattgcgaaaggaatcagcgagttgataaagtttctccgtccgctgggggagattgtggtaatggcgccggatgcgccgcgttcgggtaatgcgtgtgcgcttaccgtgacagaaccgattcattatcagttgcttcgcaaggatgtgggactgacggtctataagtgttccggtacgcccgccgattgcgtcaagctggcattccatacggtgctcgaccgcaaacccgaccttgtggtgggcggcattaatcacggcgataactcctcggtcaatgtgcattattccggaacaatgggggtggttatcgaaggctgcctgaaaggtgttccctctatcggcttttcactgtgcaaccacatgccggacgccgattttgagccggcgggagagtatatccgcgagattgcccgcaaggttctggaaaaaggcttgccgccgttgacctgcctcaatgtcaacttccccgataccaaagagttgaaaggggtgaaaatctgcgaacaggcaaaaggacagtggaccaacgagtgggagaacttcgcccacagaggcgatgcgcactactattggctgaccggagagtttgaggagtcggaaaaggagaatgaaaagagcgaccattgggcgcttgccaacggttatgtagcggtgactccgaccacagtggatgtaaccgcctatggcctgatggacgaattgaaaacctggttctgacggattgcacaggatattgaaacataggcgcttatgaagtattatctgattgtgggcgaggcctcgggcgacctgcatgcgtcgcacctgatgactgccttgaaggcagaagacccgcaggccgagttccgctttttcggcggtgacctgatggcggctgtgggcggaacgttggtgaagcattataaggaactggcgtatatgggcttcattcccgtcttgttgcacctgcgtaccatctttgccaatatgaagcgttgcaaggaagacattgcagcctggcagccggatgttcttattttggtggattatccggggttcaacctgaatatcgccaagtttgtccatgcccgtacgcaaataccggtgttctattatatttctcccaagatatgggcctggaaagagcaccgtatcaggaatatcaaacgggatgtggacgaactcttctccattcttccgttcgaggtggagttcttcgagggcaagcaccattatcccatacattatgtaggcaatccgacggtggatgaagtcactgccttccaagccgcttattcggaaactgcggatgagttcaaacgggccaacggcctttcgccgaagcctgtcattgccttgctggcaggcagccgcaagcaggagattaaggataatttgccggatatgattcgggcggccgcttcatttccggagtatcagttggtgctggcgggagcgccgggtatctctccggagtattataaggaatatgtcggcaatgcagacgtgaagataatctttaatcgtacttatcctttgctccggcatgcggaagcggcattggttacttcgggcacggcaacgctggaaacggcattgttccgggttccgcaggcggtgtgctaccatacgccgatagggaaggttatcgctttcctgaaacggcatgtcctgaaagtcaggtatatatctctggtaaacctgattgccgaccgtgaggtggtgaaggaactggtggccgataccatgacggtggagcagatacgtgcggagcttcaacgtatcttatacgatgaggcgtaccgccggcagatgctcgacggttacgaatatatggcgtcccgcctgggcgaggcgggagcacctgtgcatgcagcccgtgaaatggtggctttgcttaagaaacgttttaaaaagtaggacgatatttaatttcttgttaaaaggaataaagccggtgcagtaaatgcccggcttttgtattttctatacagaaagaaataaacaaaagaactttgattatgagaaagctacattggttatttatggcagtttgtctggctgtgatgccggtactgcaatcctgtgatgacgatgaggggtattcgatcggtgatttcactccgccgctgtgggctacggtgcgtgttaccggtaatgctttttatttggactgtgatgtgtggggaacgctctggcctgtgaatacagacttgtggtggtacgagccggttgatggaaagcgtgtgattaccatgttcaatcctttgtccgatgagtttgacggttacgaccatgctgtgaagatcctgagtttgcaggatgtgctgacgaaagaggtcgagacgctgactcccgagaccgaggaagagttcggcaatgaccctgtcctgatatttgaaggtgatacaagcatcagcgggggatatatgaatatcatatttatgcagaatctgccttccggcactaaacatcgtatcagcctggtacgtccgcaagatgatgcggagttgtatggagaagacggttatatacatttggctctccgctataacgactatgacgatttgacggggttgcgcaagcccggtgcggtgtcctataatctgaacagtctcaacgtgacctctgaaaccaaaggtatcaagctgaaaattaattcggaaaagaatggcgaggtggaactgacgttcgacctggtggttaccggtgataatacgaagaatatacgggaccttgatttgtcgaagatgcaattgaagtaagcgtttccttataccgtatatataggccaaagggcatagaggttacagtatctttcctctatgccctttggcttatattcgtttaagatttcctgtcaaatcattgtcattacatacaggtagactaccgctgcgggaatcgccatgagagcgctgtcgaaccggtcgagcattccgccgtgtcccggaagaatgttgccggaatccttgatgcccagttgacgcttcatcagcgattcggtgaggtcgccccaagtgccgaaaatcactacggtaactgccagtcctgcccattgccatgtagacatgaatgggaagaaatggacaaatacaaaggatgaggcgatggagaaaatcgcgccgcctatgctgccttcccatgatttcttaggcgaaatgcgcgcgaacaggcgatgttttcctatcagagagcccacgcagtaagcacccgtatcgctcagccagatgaatacgaatatggaaagcggcaggatggggttataggttacgctgctcgtttcaggtgaattctggaaagcgagtacattcagcaatgcgaaaggtaaggctacatatagctggctcagcattgcatacgcccagttgccgatggggttctcctttttcaggtataactccgtaatcatcaaatagagcaataagcccagatagggaaggaatacgcgcgcatcgatggcggatgtgcagaatcccatgagtgcaaggaacagataggctccgcctaaagcggtaatcgtcttgttgatgctgactccgccgttcctgtttaccagatgggcaaactcgtgtacgctcaatgcgccgatgatagtgaatagaatcccgaatgagagggggctgtaaaggatacagcccaccagtataactacaaataatgcacctgtaacagcacgttgtatgaaattatttttcaaggtgttttcgttttaattgttcgagccggtgttatggctttcttcttcttttacctctttttccgcttcctttgccttggcagcctctttttcttcggcttctttcagctctctggaagttttgcttgcgctgataatctcttcggaacgggaagcccacggacgcttgccgaagatttcttccacatcttctgcaaagattacttccttgtctatcaacagttgggccagcttgttgtgcccttctttattgtcggatagtatcttcttggcacgctcgtactgttcgtttaccatacgcttcacctcttcgtcaatcagttcggcggtcttctcgctgtacggacggttgaacgagtattcgtcgttattgtaataacagagattcggcagtttgtcgctcatgcccaaataggcaatcatgccgtatgcctgcttggttacacgctcaaggtcgttcatggcgccggtagagattcttccgatgaacagatcttctgcggcgcgtccgcccaaagtggcgcacatctcgtccagcatctgttcctttgtggtaatctggcgttcttcgggcaggtaccaggctgctcccaaagcacgtccgcgtggaacgatggttaccttaatcagcgggttggcatattccaacagccaggagatgctggcgtgtccggcctcgtgtatggcaatggaacggcgttcttcttcggttgtgattttggttttcttctccagaccgcctacgatacggtctaccgcatccaggaagtcctgcttctctacaaatttctttccatgacgggcggcaatcagggcggcttcgttgcagacattggcgatgtcggcgccggagaatcccggagtctggcgtgccagtaactctacatccaccgtattgtctatcttgatggggcgcaggtgtacgccgaatacttcttttcgttcattcaggtcgggcaagtcgacgtgtatctggcggtcgaaacgtccggcgcgcagcagtgccttgtccagtacatccacacggttggttgcggcaaggatgatgacaccgctgttggaaccgaacccgtccatttccgtcagcagttggttcaaggtgttttcgcgttcatcgttaccgcccatggcggcagcttttccacgggcgcgtcccacggcatcgatttcatcgatgaatacgatgcaaggcgctttctctttggcttggcggaacaggtcgcggacgcgggaagcacctacgccgacaaacatttccacgaagtcggaaccggccagtgagaagaacggtacgttggcttctcctgccacagcctttgcaagcagggtcttacccgttcccggagggcctacgagcaatgcacccttgggtatcttaccacccaggtctgtatacttctggggttgtttcaggaattctacgatttcctctacttcctgcttggcctctgcaagtccggcaacgtccttgaaagtaacctttaccggagagttcttttcaaacagttgggctttggatttgccgacactgaagatgccgctgccgccacccatgccgccaccgctgctccaacggcgggacaggaatatccagaagccgataagaaatgcaaacggcaatatctgccagaggattgcaccgaagtaattgtgtttcttttcgtagctgatagaaccgtcgaaacgtgtctcgtccttttctttctgcaggaagtcgcccaagctttcgcgtgagggagcttctgttgtaatcaggggattcttgcccacacggcttgaatctgctttgaatacattgggcacatattgcggcttgacgtatgcctctacggagttgtcgtcataaccggtcactttgcttatatagccgttgcgcacatactcctgaaattcatcataagggatgtttttgctggccgaaccgctttcattggtgaggtacagtcccagcaacatcatggctataatcatatacaaccagttcaagttgaacttgggcatattggtttttgtgggctttttattggtgttattgtccataagtctaaattaatcgagatcggggatttgggttagtttggcatctgcccataagtgttccaagttgtagaattcacgcgcttccggctggaaaacgtgaaccagtacatcagagtagtccatggctacccactcggcattgcgtagaccgtctatcgcaaaaggtttgctgttcgctcctttgcgggtgaagtctttaacggactccactatggcgcttacttggcttggggagtttccttgacagatgacaaaataattacatattgtgtcgtctatccgggtaaggtctgctatgacgattttttttccttttttatcttgaataccttctgttatttgttgaattaattttttagcttcgttcattacacattattaatattaaacaggcgacaaatatacgttgatttatcatatcaaacacgcaaaaggggaaaagtctttcattttttgtttttttttaggtatataattctttgtgtcatggtatcttatcagattttaatgaaaaaaatagcgaaaaatgttttggattaaagaaaagtttgtatctttgcaccgcaaaacagaaatgaaatgctcaattgggctatggtgtaatggtaacactacagattctggtcctgtcattcctggttcgaatccaggtagcccaacacaacacaccgataaaaacccactaaaatcgcaagttttagtgggttttttattgcttttcgaccatgtgcaaatttttcataatcggtattcgggggatcaacgtaacaatctgagggattttatatttaagcatataatttagcaagtctatataagaaaaaagctctatctcttactcctctgaactgtgctctaaatgctttgattttagcattgaatgactctgctgcggcattggttgccctcctttcaaagaaattgattatatccagataatgtgtttgtatagaacgtgcgacccttccaaaggtgaggaaccccgatttatctacttcatcataccaccttgccagccttgtcaaagcaatatccttaaacttacactgatgatagattaagcctaaccgcatagacagataatatcctttctttatatcgggatattccttgaaaagaatttcagcccgtattctttgagactgagtccataaggattccttcttgtaaagcagataaatacttctcgctaacaactgctttcttgtatctccattagcgaaaacaggtgcatgatacatctttccacaggcctttgcataagcaatctgagtggactcttcatccaaagcctcccagcgagcttttacacgcatctcctgcacagcttcataagctaacttctgtacgtgaaagcgatcggtaacacgtttggccgcaggaaagcagatgcgtgcaatctgctccatgttaggagccatatccaaggttatctcgcgcacttggtaacggcggcgacgggagagcttaagcagaacagaagtgaccgtatgaacgtccgtacctttaatgatggcaatcatactacctttaccaccgtgagcttctttattggtcagtacagtatagagttccccacgcgagagggctacctcatcaatacagatataagcaccgatattcttttcgaatagtagccaatcctctgcatgaacaagttggtcccaatggagataaccacttagatggttacggtattgacgctccaataaatccccgtcaactccatataaaacacctaagagcttgcaactgatcggatagctatcaatatagttcttttaaaaaagacgcaaaatcctgcgtcatacgagtaccttcagccaccatacgccagttacgggagatatactcattatgcttctttaagagccagcgacgacgacgaatattaaggaagaccttcttgccacgaagaggaaaatcctgaacaataacaggagcataaaagcctttactctcaatatcctgatctgtatacttctcaggaacgatatttttctcctcaaggtagaatacaacttcatttacactttctttcacatcaacaagatcaaagtagtctaaagtgccttcaggaagaagaaggcgataaccgtttaactccataagctatgaatttggagacaaagataacaatttataaatttacccctcaggtttttacattgacccgtattcggtgttcgaatcggtggttgtgtcaaaacaagaatatcagcgagttcgttttgacacaaccactttttatatgcttattattataagattatcacatctactcccggctttagcttttcttgattttgcggatcggcaatctgcatatccgtcaccttgcctttgcttttctttatttgtacaacacagggcttcagggcttttacctttatttcttcactgtcgaaagtgccgggcttgaagaatacgatttgcagaattcccgatttccgattattgacggcttgtatttccgtatcattccgttctattttcagatgatggcaggagtatgttttcattttttccggatggttgattcccggtacaacgatatatgcgtaagatgcgtttcggggagattgtccgtgattaatgaccagattgaatatcggcatgctgatttccgtagcaggataattgaaattgatttttgcccagttgcctttttgtctgtccatctttagctttatattgtttccctgagagaagagataggcgatgctgtcatgccagatccattgcggagcctgttcaaaagcaaattctccttgggttgcttgccggagcgcttttcccgtatttatccatacatttccatccagatggcattgattgacagtggtaacgatgtctgtcggaacatttgaaccgattccgctgcctaagcaaaccacttcgttgtcgaacataaaccatgatttttgagcttttacaccatagtcatccatcttgaaagtcattacaccgtatttcccatcggacactccccctgtgaatgtgcaggttcctttgcttccccagtcaacgggattgcgtttttcgcctgcaggcaaggtggttcccggtattctgtcccactcccagacggggaagatgtcggcatactcattgccgttgacgcgaatgttggtagcgccgtcactcatataggtcccgtatagattttcaccgttaccgctttcggtcttgttggtgcgtgttgaagaggtgcgcacggaaaagtcgtaattttgtcggttgtgtagcatatagtctgagcaatgatacattgtattcttgtccgaacgctgatacgatgcttcctgggtgaggaaacggcgggcaatgtctgcatattcgccggcatgtttggcatcaagggcctgcaggtttctgaacagggctgcgcaatccccgtaatccaatgttcctttgcggctgacacctctgcctgttacactgaagtccagatacctgcttcggaatacattgaagtaggtgttgcggataaagttggaaaacaaggtgagtttctccggattcatggcatattttgtaccgttgaggatattgcccatgcggactatgttgtcaacgaacactgttccgtatccgccgatgtaaagttgcggcccgtgctggtgataagacaagtcttcctgtatgccttcgtttgcaacgatttgtacgggatagaatatttcatcggcattgacacgcacaatactgtcattcttcaacaggcagcctcttactaaatgatgaatggcaatgtccattttattggcgccggtccatttgcgtgggtcgctgcgttcgcccattgcttttaaaataggcatacggatttcggacggaagtttcctttgtcccgcatccatcagagcaaggagcgaggcttgtgtttgcggaacggaaatctggttataccaccagttgaaacaggtagggtcttgtttcacccaatactgcagggcatctctgattgcattgtataatacctcgttaccgtaataacgtgattgtttgtcggtatatgaggcggctattctaaccaaacgtttcaggtgttctatcggttcccagttggtacggaaaaagcaggcataatcgaggtcgctccatttaccttccggaagcatggagcgcagtaatttttccgttgcgcggtctgcttgctgtgtggtggttttggcatacaattcttcgcgtatccgttcaagtatctgctcatattcgtcttgcggaatataggttgggctttggcttcgctttccgttggcgggattatagcgggcggaataggaaggggtctcacgttttatctttcccgccatttccagggtaactactcctttggcagctctgttagtatatatttcggctacgaggttgatgtcgttttctgttctgccttgcgggtggtagaccaaccgtattatgccttcctcaccgggttgataggctttttcagtccattcggacgaggtgcatccgcagccggtaatgatgtttttgatagtgagaggtttgtcgccggtgtttacgaaccggaagtcatggctgacattcccgtcttgttcccggacggtttcccaattgaatttggtttctgagaatgtgatttcttgtgccggtagcagactgtttacagtcagtagcacgattcctaaagtcagaattcttttcataattcatcagtgagattagatttagataaaaaagaggttatgtcaaaagccttttatccttttggcataacctcatattattaggttcgaaaaattattccgcttcgttgattgaattgtcaatcaccttgattttctgtttaaccagctctatgtcacctttcagcttctcgactttacggttaagttcggtcaggaggctgttgcctttcttggacgaagctgtcaggaagcctaagttgttttcgtaagtctgcaattcgtttttcatgttttcgcaggcgcgtaccagtttgtcccgttcacgataaagggcttgcgggctaccttcctggatactgctgatggacgatttgaaattactcagcttcttgttggaggcactgatgttgaagtgttcaaacagcttgtctatccggctgtggtattgtttgtaaattttatctttttctttgaatggtacatgtcctatgccgttccactctttcataagttcgcggaccagttgggtggcttcttccacatccattgtttcgtcaatggctgtcagcttctcgataatggctttcttcttttccagattctcctgttcaacggaacgttgtgaggaagttgccttgtttttctgttcaaagaagtaatcgcaggcggagatgaaccgtttccagatagcatccgaatatttcttggcaacgggacctaccgttttccactctttctggagtttggtcagttcgtcagctgttgctttccagttggtactgtctttcagggcctctgctttttcgcataaggcacgtttcttttcaagattcccgttcatgccttctttcagggatttgaagaattcccctttcttctggaagaactcgtcacaagctttgcggaagcgttcgaatatcttcacgttcatcttttgcggagcaaaaccgatggttttccatttattttgcaaagcgatgatttcctgggttttgttttcccaggaagcgaagttggtaagttcgctgtaatcaatggcctcgatgatttcgcaaattacggtcttttggtcgagattatgttgctcggcctctttcagggcttcaaaatgctgctggtgacggcggttcacagtagtagaagctgctttgaagcgtgcccatatttcatcgcgcagctctttggctaccggtcctgtatcgcggaattcctgatgcagtttctgcaattgatggaaagcggaaacaacatccgcttcgtctgccagtttctcggcagcttcgcaaaggtggttcttgatttcaagattcttcttgaagtcatattcacggaattcgttgtttagttttaaaaggtcgtagaacttttcgacatacagctggtagttcttccacagctcgttaatcctggcttgcggcacgattttaacctcattccattgctgttgcaatttcttgaattccgtatagttcttgttggcgtcttccggagattccaccaactctttcagttcctcgatgatggaaagcttgatttgcaggttgagctctttctgtttttcctgctctgcattgagtgcgtttcttttttccttgatgacggacatggtattcttgaattcctcttccaaagtatcggcttgtggaacgaactcttcaatagctcccccattctcaacgaacagcttcttggcggcttcctgctctgagttatgtagtttgtagaaagcctgtttcaaaccgtctatctccgatttggcagcattctctacatctgcggcaatcgctttaagcttgttcagaatctcttctttagtgagtttttgaactgattcggccggcttgtcagtcaaggttacctcagcgggagtttctgttgttgccggctcagaaacctctgctgtttttttgtcttcttctaattccaccggcttgtcggggagattagtgtcatgagtgtccgtcatttgtatttactttttagaaacgggatatcccgttcgggttacattaggttacaaattaatgaaataaaatgattacttcatacttttttcatcgttttttttcgatttagccgtttcaggccaatagtacggtgatgcccatatacatcatcatgccgataatatcgttggtgatggatatgaacggtcctgtggcaatggccgggtccactttcagcttttcgagtgtcatgggtaccaatgttccgaaaatggaagcgaacatgacaacggcgaacagactgatggataccgagtaggtaactgtggccgtaccgccgaaccgtacaaaattgtatatatacaccagcaaggatatgatggttgcattgattgccgccactacggattccttggcgatttgcttgaatgtgtctttggcatccaaagaactgttggcaagtccctgtacgataattgcagaggattgggttcctacatttccgcctgtaccgccaatcagagggatgtacagcgccatttcgggatgtgcggtgaaggtagcgtcaaaattacccaatatcatggagttgccgataccgcccagcataccgataagcaaccacggcaggcgtgcggaagtctggcgcatgacgttgtcgtccgtctccacatcctgtgacaaaccggatgccaactgatagtcgcgttccgattgctcacgaacctcgtccatgacgtcgtctacggtaatctgccctaccaggcggcctatgctgtcgacaacaggtactgccaccaagtcgtatttctcgataatctgcaccacttcgtctgtgggagtgtctacatggacggaaatggggtctttcctcattacatgcttcactttggagacggaaggagaggtaatcattttctttagcgggaatacaccttgcagccgttcgtcatcgtcaatgacatatacgtagtagatttcgtccaactgttcggcttgcaggcgcatctctttcaggcattcaggcatactccagttctcgttgacggttaccatttccgtacccatcaaaccaccggcggtatcttcatcgtacttcaagaggtctacgatgtctccggcctgctctatatcctcaatatgcgacagtacctcttcttttttctcctcgtcgaggtcacgcatcaggtctacggcatcgtccgtatccatataatccacaaaccgcttggcaatggtttccgaaggcagaagttccaggaattccttccggacgtcttcatccatttctaccagtacgtcggcggctgtttcgttgtcgaggagacggtaaacgaagcgtgcctcttcgggcgcgaggtcattacacagttcggcaatatctgccggatgcaggtcgataagaagcgccttgacgttttccgcgtctttctgctctataaagcttttgactttatctatgtattcttcgtctatttccataactcatagtgtattggtaatagtgtaccgttaagggctgaaaccgttaatttctcatttttctgtcgtctctttcaatgctgtttccacctgattggtcaattctataaactcctgcacggaaagttgctcggggcgtttgttgaagagagggtcttcggtcagcggacattctttgccgagtatcggttttatggaattacgcaaggttttccggcgttggttgaatgtagtttttacaacttgtttaaacagcttttcgtcacatcccaattgctgcgtgtcattgcgcgtcatgcgaataacggcgctttttacttttgggggaggattgaacacgtgttcgcttacagtgaagaggtattccacccgataccaagcctgtatcagtacactcagaatgccgtatgtcttgctgccgggaccggctgcgatacgctcggcaacctctttctgtatcatgcccgtacagcacggtatcagttctttgttatccagcatcttgaagaatatctggctggatatgttatacggataattgcccgtcagtacgaaaggctgtccgtcgaacaggcgttgcaggttcattttcaggaagtcgtcttcgatgatgttatcctccagttgcgggtaggcttcccgcaaataggccaccgattcataatccacttccacaacttttaccgtgcgctctttgggtaggagaaattgagtcagcactcccatgcccggtcctacttccaatatcggaagattgggacaggcgtctacggtgtcggcaatgtcctgtgctactttcaggtctttcagaaagtgctggccgagaaactttttaggtttaactaatctcatgtatcaactaaatcgttacttttgcggttcaaaggtaatccttttcggcgaattacgagttacaaatcacaaattacgacgcgtgccggatgaattttaagggaaaacgatgaataagataataaaaaaaacattgaaaatcgtgttgcccgttcttttgggcggttttatcctgtattgggtgtatcgtgattttgattttgaacgtgcgaaagaactgcttttgcatggcactgactgggggtggatgctgttttcattgttttttggcgtaatgagccatgtgtttcgcgggtggcgctggcgacaaacgctggaaccgttgggggcttatcctaaaaggagcgattgcgtggacgccattttcatttcctatgctaccaatttgatattgcctcgtgtgggtgaagtgtcgcgttgcagtgttctggctaagtatgatgatgtatcgttttccaaatctttgggaactgtggtcaccgagcggttagtggacaccttgtgtattcttttgattacggaacttacctttctggctcagatgcctgtgtttctccgtttctttcaggaaacgggtacaaaaattccttcgctgatgcatctgttgacatcgccctggttttatgtctccctgttctgtgttatcggcgtgctggtgcttatgtactatctgatgcggatgctttctttttttgagaaagtgaagggagttgtgctgaatgtatgcgagggggtaatgtcgctccgcaatgtgaagaacattccgctgtttattctctatacattgcttatttggggatgctatttctatcatttctatctgactttctatagcttttcttttgcggagcatcttggctttcaggctgcaatggtgatgtttgtgggcgggacgtttgctgtaatcgtacctacacccaacggggcaggtccctggcattttgccgttatcaccatgatgatgctttatggtgtgaatgctacggatgctggtgcttttgcactgatagtgcatggcattcaaaccttgctggttgtgttgctcggtatctatggcgggctacatgtttcgttggtaaaccgtacgaaatgaatgacttgaattgatactttcacagaaatataaacacataaataacccatatgtctgatactttatcatctgcatttgcagatacgaagccgcattataacatactcgacgggctacgtggagtggcggcattgacagttgtctgttttcacttgttcgaggcttatgctaccagccatttggaccagaagattaatcacggatatttggctgttgattttttctttattttatccggattcgttgttggctatgcttatgatgatcggtggaaaacaatgcgtattgctgactttcttaaacgtcggtttattcgtttgcatcctatggtcattatcggagcgctgattggagctgtaatgttctattttcaaggctgttctgtttgggatgtttcacaggtgcccgtagtggcgctgataattgctacgctaatgaatgttcttctgattccggcaactcccggtatggaaattcgaggcgtaggtgaaatgtatcctctgaacggaccgagttggtctttgttttttgaatatataggcaatattctatatgcattctttctacataagctctctacaaaagtcctttccatattggtgttgtcagcgggttgcggactggccatatttgctctttgggggccgcttggcgatatatgtgtgggctttgctttgacggaagaaaatataataggtggttctttacggttgctgttctcatttccggcgggattattgttgtcacgtgtattcaagcctgtcaaggtacgaggagctttctggatagggagtttctctattgtggttttatcggcgattcccagaattggtggcagtgaacatttatggatgaatggcttgtatgatactatatgctttgccgttgtatttcctttggtagtctgtcttggggcttcgggaaagactacggataaagtcacgacacgggtttgcaggtttctgggagatatatcctatccgttgtacatggtgcattatccttttatctatctgtattatgcttgggttaagaatgagaaccttacattcatacagtctctgccgggtgcggtagcacttgttgcgggttcagttgttttggcttacttatgtctgaaactgtatgatgaaccggtacgcaggtttctatcccggcgacttcgtataaattgaacggggttttaccgatttttgcaattccgattagagcgatattgaaaaataactcttatatttgcgaaaacaacttttataattatgagtacaatcttgcagttagctccacaaaatgtgtggaagcatttctattcgctgactcagataccccgtccttccggacatatggagagaataactgagttcttggtaaattttggtaaaagtctgggcttggaatcatttgttgacgaggttggcaatgtcattatccgtaaacctgctacaccaggtatggaaaaccgaaaaggtgtcattctgcaggcacacatggacatggtgccgcagaagaacaacgatacggttcatgattttactaaagaccctattgaaacgtacattgacggtgattgggtgaaggccaaaggtactactttgggagctgacaacggattgggcgtagccgctattatggctgtacttgaggcaaaaaacctgaaacatggtccgttggaagcgttgataaccaaggatgaggaaacgggtatgtatggcgcattcggcttgaaaccgggtacactaaacggtgagatcttgttgaatcttgattcggaggacgaaggagaactttatatcggttgcgcaggcggtattgatattacggctacattggaatataaggaagagactcctgctgctgatttagtagctcgtagaataactttgaaaggtttgcgtggcggacattccggattggaaatcaatcagggacgaggcaatgccaataaattgcttacacgtatcgtacacgatttgctgattgagttcgattgtcagttatcaagttttgaaggtggcaatatgcgtaatgccattccgcgtgaggcacatgccgtattggtatttaatcccgaagacattgaaggattggaagactatatcaaggaatatgaggtacagattaatgaagaatatacttcgattgaagaaggcattgttgtaaaactggagaacgtagacttgcctgctgccattgttcccgaagaaattcaggataatatgattagtgtattaatggcctgtcagaatggggttatgcgtatgattcctactgttcccgatacagtggagacttcttccaatctggccattgtaacgattggcggcggtaaggctgatgttcgtatattggctcgcagctcttgcgatacgatgaaagatttcctggcagatagcctgacagcatgtttctctatggcaggtatgaaagtagaactgagcggcagttactccggctggcagcccaatgtggattctccgattctgcatgccatgacgttgtcctataagcaacaattcggtgtagagccggctgtaaaggtgattcatgcaggtttggagtgcggtattatcggcgccaactgtccgggacttgatatgatttctttcggaccgacgttgcgttcaccgcattcgcccgatgaacgtgcatatatcccgtctgtaacgaagttctatgacttcttggttgctactttggaacagactcccgaaaagtaattttctttatacataacaatgtgaaagcagagtgtggttgcgctctgctttttttattgctgccattttcattctggtctgtcagaattactttgctttcctgacatttagtccttgcttgctgctgtaatattgcaggaaattgatttaggtcaagaaatatgttttaaaacatgtttttctatatgttttcacttgctatcttgaacaaaggccttatttttgtgttgtaaaacatagaaatgataggataacaagttatttttaagaataacaagattgattttaggaggataacaaaatgaaaaagttaagaaaattgttcagacatttcggtgaagccgataagaacatttggggttatgtaatgctttaagcattcattccccctttttaagagagaaagtagttttcagttttcaagatgttagtttagttttttaaggttatgagaaagaaaataatggattcattcagacgtattctcgctgaggtaggtcgtaatgagatgttgatgatgggatataccatcaagaaataaagaaaaaagtgttttcagggtatctgtttaatttttaagattatgggaaaaaagattgtaaattcttttaaagacattctctccagagttggtgagaattggattgaagcaatgaagtattataactacccgagatgagtgtagtaattgataagaaaccgggggatatgttctgagaatgtatcccccggtttctttttataaccgtaggtttttatgtcagtatatgctttgtttctttattttttctaaaaagctggtacaatgtggttattattttgttatttttacagtggacattcatgtagcggagatatgaatgcagctaatcatacagataaatctttattgtttgattcctgattcgcataaaaaaacaaaaactaataacaatagaatagctatgaagaaattccaaagattttgtacattgtttctgctgatgatcgggttgtgctcctttgctttgcacgctcagtcctatgcaggtttgtggaggcaggtggagcaggctcaaaagaagagtttgccgcaaacggtagtgaagctgacggagaaaatctaccggaaagccgagttggagaaaaatgctccgcaaatgctcaaggcatatatctgtcgggaggcttatcaggaaagactgactccggatagcctgtatacgaatttgaagaagttggaaagttgggtggaatcggagaaaaacctggtaaataaagctattctgcattcattgcttgcccgcgagtattcggactatatgcggcataaccggcggcagttatcagaccgtacggcgctggatgtggacgaagctcctgccgatatcagggaatggagtactaacctttttgttgctaaggtagatgaacataacctggcttcattgaaggactctgttcgtttgcttgaggtctcttccaaggaatatgtgccttttgtcgagcttgaagacggaagccgcttctatgggcacgatatgtatcatctgctggcggcccgggctgtcgatacttatcagttgttggacggctttcaggtggatacattacaacgtgcccgcatcaacagtgtttatacaaatatgataaatgcttatcggcatcgcgttggggcagaagatgcggtagtgctggcaacgcttgattattggaagtggaaaagtaccggcggcggtataagccgggagccttataccacttatcgggaacggaaagaacggcttgataaagagcatcttgaagtgttggataatctgattcgggaatatggcggtcgtgagatttgcgcggaagtttacattgataaagccggttggcttcgcggtttgggagcgtcttatatggatgaggttttgcaggtatgcgatgaaggagtgaagcgctatccggcttataagcgtatcaatgaactacggaacataagagagagtgttttgcagccttatttgaatgtcagcactcaagagagcgtttatcccggtgattcgttggagttgaatgtgggttatcggaatctgaaaggtttcacactgaatctgtaccgtacgaatctctccgaagtgccctggatggatgccggaatcaacaaggctttctatcagaagcatgcccgtaaattatcagctacccattttgaactgaaatcttcggacagcaaaagcgggaaagagggagaactgttgagcggtttgcaacgtatggttttgaaatgccatgtgccggacgaattaggcgtatatatactgcaaattgtacctgatgctgcaacggcccgtattgcagagcactttctcgtctcgacccgctttaaggtgttgacgctttctttgccggataataagatggaagtggttacggtggacagccgtagcgggcaacccatttccggtgcaaaggtcagtttctattccgcttacaatgaagaaaaccgcaagctggtgaaaacagttgtcaccgataccggtggaaaagcggttgtggaatgggataaggccatccgcagttatgtggtgcgtaagggaacggatacagccatgatgcctcagaatgtttatttgaacagatattacgaacgcggagagtcgcgtccggaagaacatatcaccttgttgacagaccgcgccttgtatcgtcccggtcagaccgtttatgttaagggtatcgcttatgaacaggaggcggacaaggctcacgttttggcagggaagagttatcaggtacgtttgttggacgtcaacaggaaagaactggtacagaagaatgtaagtaccaatgaattcggttcctttaccactgaatttgcgttgcctgcagtctgcttgaatggtaactttacaattgatgtaaaaaacaacgcttccgtttccgtacgggtggaggattacaaacggcctacctttgagattacctttaatccggtggaggaggctttctgcttgggagatacagtggatgtaacaggcaatgtcaaggcatataacgggacggcaattcaggatgttccgctgacatataccgttacccgtcgcagtaaccggagatattggggagatggggccgtatcgcttgtttcggatacggtgcaactggatgcaaaaggcaacttttccattcctgttgttctgaagccggatacggatgcggataatacgggtagggaacgtttctcctatcagatagaggtagcagtgacaagtgatacaggtgaaacgcagacttcgcattactttctgaacgctacccgtcgggcttatttctttgtgtccgacatcagcagggagttatgcaaagaagattccatatcgggaatgctgtcggtaatgaatgccgttaatgaaacgctgtccatggaaggaatgtgccgtctttatcccgttcttgattccaagacgggaaaaatctccgacaagccggtttatgagagtgcgtttatgccgggcgaaaagaaagactttacagcttggaaacaactgccatcgggagagtaccgcttaattctgtcggtgcgcggtcgcgacggcaaggaagtcagcaatgcagacaatgcggtgaacattgtactgttctcgctgaaagatgaacgtccggctgtgtttatggaaactttcctttatgaaaagaatacggagttcgatgcgactcatccggcaatcttctatttcggcacttccatgaaggacgcatacgttctggtagatgttttcgggcagaaaggcagattggagagccgtactttgtcgctgaacgactcgattctccgtatggaatatccttatcgggaagagtacggagacggagttgccgtgcagtttactttcgtaaagaacggactgctatatacccgtagggtggaattgaggaaacgtctgcctgaatggacgctggatatgaagtgggaagtttttcgcgaccgtttgcgtccggggcaggaagaagagtggaagctggtcatcaaaactccgcaaggttttcccgccgcagccgagatgctggcaatgatgtacgatgcttcattagaccggatttatagccgtaaccagttatcaagcgtttattacaaccggtatattccttattactattgggatatcagtaataacaacggaaagagttatgctccttacttcccggtgaagtcatggagagttcctgtttggcgcttcgactatttctgttctccttataacggggcggcggaagtattgcaaatagtagagaacgatgcggctctctgcgagccggtaattatggggtatggagccatacggaccaaaatggaaacaggacgtgcagttgaagtgaagtatgttccggtgcaggtagaagaagggatggcggatgtcgtttttgagtcggagacgattccgcttgatgaacagacattacagcctatggccgatttgcgtactaattttgcggaaacggctttcttctatcctcagttacgcacgaatgaacaaggagaggtcgctttctcctttaccatgccgcagagtctgacacgctggaatttccgcggttattcccatactaaggatatgatgacaggcatgcttgacgctaccgctgtcaccgccaaagagtttatgcttactccgaatatgccccgctttgtacgggtaggcgataagacacagatagctgccggcattgccaacctgacgggtaaggcaataaaaggcacagccgtattcacccttttcgatccgatgacggagaagattatttccaccggtcgccagaagttctcggtggaagccggaaagacagcatcggttagtttccggtttgatgtaacagaccgttacgaactgcttggtgtccgtatagttgccgacggcggtactttcagcgatggtgaacagcatttgttgcctgtactgagtgataaggaatatattacagagacgcttgccatgcccgttcgtggtgaagaaacgcgtactttctcgctggacagtctgttcaacggtaacagccgtacggcaaccgaccgtcgcttgaccgtggaatttacaggcaatccggcatggtatgccgtacaagccctacctgtactgagtgagccttcaacggataacgccatttcctgggcaaccgctttctatgccaacactttggcgggatatattgcaaatagtcagccgcgcattaaagcggtatttgataactggcgtctgtcgggtggaacaaaggaaactttcctcagccggttggagcagaaccaggatgtgaagaatattctgttgggcgaatctccttggttgctcgaagctactacagaggctgaacagcagcagcgtatcgctaccttatttgatgttaaccaattaaattaccgtaatatggcatccttgctcaaactgaaagaattacagggcgaggatggtgcatggagctggttcggcggcatgtccggcaaccgttatgtaacgggatatatcaccggactgcttgtccgtctttctttgcttacggataaggcattgccggaagaagcagcgatgatgaaagccaaggcctttgactatctgaacaaagaggctctgaaagaataccgtgctatccgcaaggcagagaagaatggaacgaagattaccgttttgtcggatgccactatggaatatatgtatctggtatctctcggttcggtaaagctctccggagaatatgcaaaagcattcggttacttccttaccaagctgggacgtaatcttgagagcggtaccatgatccgtaaagcgcagacagccgttatcctgcagaaggcaggacataaaacggaagcggatgagtttatagcttccataaaagaacaccttgtacagacggatgaaatgggagctcattttgctttccatgccaatccttatacttggggtatgatgcctgtacccgctcatgtagctgtaatggaagctctgcgcgaggcaggcggcaatgatgctttagtagaagaaatgaagctttggctgctgaaacagaaacagacgacaagctgggattctccggtagctactgctgatgcggtttatgcgttgttgtgtcagggtagcaatttgctggaaagtaaaggagatgtccgcattactttgggtgataaggtgttggagactttctctcctgcaaagaccaccgtacccggattgggatatgttaaggaagtctttgcgcaaggcagtcctgaggtgaaagcaaagtccgttaccgtagagaaaagggatgcgggcattgcatggggagctgtctacgcacaattcttgtcgcccatatccgatgtgaagcagcagggcggagcattgaacattgagaagaaactctttgtagagcgcatttcggccgacgggcagaaatctttgcaaccgttgacagaggtagcacagctcttcgtgggtgataagattgtttcccgacttactgcccgtctggaccgtgccatggatttcgttcagttgaaagaccagcgcggagcttgtttcgaaccggaaaattcgctttcgggttatcgctggaacaacggggtcggatattatgcggaagtggaagatgcaggaaccaatttcttcttcgatcatctgggtaaaggcgtttatgtattggaacatagctaccgggtggctcgtggtggtacgtatgaaaccggactggctaccgtgcagtgtgcctatgcgccggaatatgcttctcactctgctggaggaactgttattattaaataggtcggatagatttacttgctatcgaatgtttataggttataaaaagcagaacgaaaatctgtgtatctcgcttaaaagctttacatttgtgcaactaatttagaagcaatataaatgagacgcagttttatcactctatatgcgattgcagctacggcattgactgccgtagctcaaccgcgttttacctctaatacggaaacgtatgatttcgggcagattgaatggaaacatccggtgacggtacaatattccataacaaacacaggtgaccggcctttggtgcttaccgaggtggaacccgattgtgcctgttccgtggctcaatggacaaagacacctatcgtcccgggagcaaagggaaccgtcaacgtcacttttgatgcggaggctttggggcatttcaacaaatccgtagccatttactgcaatgcacaaccccatctggtctatttgaagttcaacggtgaggtggtgcgtgaaatcaaggactttaccaaaacccatccatacctcatcggacagatacgtattgacaagaacagtcttgattttcccgatgtacaagccggtgagaagccggtgatgcatatcggggtagtgaacctgtccgatcgcccatacgaacccgtgttgatgcatctgccgccctatctgcaaacggaagtaaaacccaatgtcctgcaaaaaggggagaaaggggtcattaccgtcacattggattccgaacggctgacggacttcggactgacgcagtcctctgtctatctggcacgttttgcaggcgacaaggtgggcgatgaaaatgagatacctgtttccgccattcttctgccggacttttcgggcatgagcgatacggaaaaggcgaatgctcctgttgtcaacctttctatcaaggatattgacatgagcacagcattggcaaagaagtcgaaggcacgtcaggatattgttataacgaataccggacgttctcctttgcaaatcagcaagcttcaggtattccatccggcagtgggagccggtttgaagaagagcgtgctgaaaccgggcgaaagcacccgtctgcgtgtaacggttgtaaagcggaatattggaaagaaacgccgtcatctgcgtttgctgatgattacgaatgacccgatgcagccgaaagtcgagattaatattaaagcgaaataaaccataaatcttaccatggaacatccagaaaatagcggagaatataaaggtttggttgtcaatgcaggcattgagcaaccttcgtccgtaaatccttatttgaagcggaaaccgaaaaaacgtcaactttccgttgcagagtatgtagagggcattgtgaaaggtgatgttacgatattaagccgtgccgtgacactggtggagagcgtaaagcccgaacatcaggccatagcgcaggaggtgatagaaaagtgcctgccgtattccggcaattccgttcgcgtaggcatcagcggtgtgccgggagccggcaaaagtacgtctatcgatgtattcggattgcatgtattggagaaatacggcggcaagctggctgtgctggccatcgaccccagcagcgaacgcagtaagggcagtatcttgggcgacaaaacgcgcatggagaaactctccgttcatcccaaatcctttatccgtcccagtccctcggcaggttcgttgggcggtgtggcgcgtaagacgcgtgaaacgattgtactttgcgaagctgccggatttgataagatatttgtagagacagtgggtgtgggacagagcgagacggctgtacattcaatggtggatttcttcctgcttatccaacttgccggtacgggcgacgagctgcaaggtatcaagcgcggcatcatggagatggcggacggtatcgtcatcaacaaggcggatggggataatctggaacgtgccaagctggctgctgcccagttccgtaatgcactgcaccttttcccggctccggagagcggctggacaccgcaggtcctgacctattccggcttctacaatataggagtacaggaagtatgggatatggtatataagtatatagacttcgtgaaagataacggctattttgaataccgccgtaacgagcaaagtaaatattggatgtacgaaaccattaacgaacaacttcgtgacagtttctatcataatcctacaattgaggcgatgctggccgataaagagagtcaggtattaaaaggtaatctgacatcctttgttgctgccaagaacctgttagatacttattttgcgggattgaaaaattagtgggatgcactaggcatcttcccccttactatttgtttttaggcacggattacacagatttactttattcttttccgtgcaatccgtgtctaaaagaaatcaccaactgcattttgacagtctctcgtttcctacacctctttcccttccttctcaaagtctttgcgtgatttgctttgcgtaacgatatatacaccgagaaataccagtgcgatggcaatacctttttccatattgaatgtagccatgccgactatgactgtaacgattgaagccacgataggttgcatatagttgtacatgcttactactgtggggcgcaacagcctttgtgccgtcatgatacatatataagccaggaagctgccgcctaccaccacatagcctacttgtaacagtgccgcagtagaggtttcagcccattgtatggcggctacatcatggtaagagaaagggatataacacatggaggcatatacaaacatccatttgttcagggttataggagagtatttctgggataatcctttgaatacggtcaggtaaatagagaaactgatttgggcgatgaggcatagcaagtcacccatgatgctgccattgccgcttcctgcattgctgctgctcataatcagtatcaatgcgcccatggcgcctacaaaaatgcccaatacttttttattcgtaacaggctctttcagataaatggcagctacaatcatggttacgataggaagagtggtggttacgatagaggcatcgatgggggaagtcatagacagtccgaagatatagactccctgattgaataccagtgcgaagagtgcggcaaagaatatcttcaacatatcccggtggtctacctgctcgcgtttgcagaacagtgagagcaaccagaaacaggctgctgcacctaccatgcgaaaagtggtgacggatagagctgagaactcgactaatgcggatttgccgacaggtgccattaatccccataggatattggcggtcagagcgaacagatgaccttgtatgttcttgttcatattgtaaaatgtgtattatttgtggtgaaaaacgctgcaaaggtaactattttctcaatctctttctttatatttgctacacgaatatatagaaaccatggaagtacaggccaattacatcagacgtatcgaaatacacggattgtggcaccgatacgatatagcttgggagttgcgtcccgatgtcaatatactttccggcatcaacggagtaggaaagactacgattttaaaccgttcggtgggctaccttgagcaaactacgggagaggtaaagagcgatgagaaaaacggtgtacatgttttcttcgacaatccggaagcgacttttattccttatgatgtaatccgcagctatgaccgtcctcttattatgggagatttcaccgcccgcatggcagacccgaatgtaaagtccgaattggattggcagctctatctgctccagcgccgttatcttgattatcaggtgaatatcggtaacaaaatgattgagctgttgagcggtgacgaacagcaacggagtctggctcccgccttgtctgtgcctaaacggaaatttcaggatatgattgacgaactgttcagctatacccgtaagaaaatcgaccgtaagagcaatgacattgtcttttatcaggacggcgaacggcttctgccctataaactctcgtccggcgagaaacagatgctggtaatcctgctgaccgtgctggtgcgtaatgaggagcattgtgtgcttttcatggacgagccggaagcgtcgttgcacatcgagtggcagcaaaaacttatcggtatgatacgcggactcaatccgaatgtgcagctcattctcaccacccactcgcctgccgtgataatggaaggctggctggatgcggtgaccgaagtggaagatatttcaacggtgattggcagcaggtgagtatcaatcgcacatcactgaatattcattattaaatcaacatttattttggcaacatctctccgacataatcttacttcagcctatttggacgccgcacacaaattctcgtcaaagaaagggcgcaggcgtattgtggcgtatgtggaaagctatgacgacattgctttctggcgtacccttctggctgagttcgagaatgaggagcgttatttccaggtgatgcttccttccgccacttcgctggcaaagggcaagaaaatggtgttgatgaatacgctcaataccacggaacttggacgtagcctgatagcttgtgtggacagtgactatgactttctgttgcagggagccaccaatgtgtcgcggaagataaaccgtaatccttatattttccagacgtacgggtatgccattgagaatttccattgttttgccgaaagccttcatgaggtttgtgtacaggcaacactgaacgaccgtcacatccttgatttccccgctttcctgaaacgctattcgcagatagcctatccgctgttcttatggaacgtctggttttaccgccggcacgatacgcatacatttcctatgtacgatttcaattcctatgtccgtttgcaggaaataaacctgcggcatccttacagtgtcttggatgccatgcagcgtacggtatctgccaaactttccgaaatggaaacccgtttcccgcagtatatagaggatgttgaccggttgggtgaggaactgcggaaattaggattggttcccgacaatacctatctctatatgcaggggcatcatatcatggattgtgtggtcctgaagttgctgatacccgtttgcaccgtactgcgccgtgaacgcgagcaggaaattaaacgcctggcagagcatagcgaacagttccgcaatgaactgacgggttacgaaaacagtcaggtcaatgtatccgtcatgttgaagaaaaacagcggttacaagaacctttatctctatcagtggttaaaagaagacatccgcgagtttctcgaacgggaaaagctctgacgcactatttatactttatacctcatattttatacctaactgtcatggatatactaaagaatatcgacgaattattgatttcttggggaacagccccttctttggccgatatgctcgatcagtttatagcttttgcgcttgtgcttatcgttgcgtttctggctgatgtcatttgtcggaatatcctgttgaaagtagtggcgcatttgataaggaaaacaaaagctacatgggatgatattgtttttgaccgtaaggtactgattcacctcagccgtatggtggctcccgttatcatctatgtctttattccggtagcctttgccgagacaagttcctctacgttgggctttatccagcgtgtctgcctgatttatattctaatcacattcctaagttttatcaactcgtttctgaaagccgtttatgccgtatacagcgagaaggagcagcttcgcgaccgccctttgaagggtatgttgcagactgtccaggtgatactttggtttgtaggggctatcgtggtggtaagtattctgattgacaagtctccgttgtcgctattggcgggattgggtgcttctgccgctatcctgatgctggtgttcaaggactcgattatgggatttgtttcgggagtgcagctctccgccaatgatatgctgaaggtgggcgattggattgcgatgcccaaatacggtgcagacggtacggtgatagaagtcacgctgaacaccgtgaaagtacgtaactgggataataccattaccacgattccgccgtatctgcttgtcagcgactcattccagaattggcgcggcatgcgcgagagtgggggacggcgtgtcaagcgctccataaacattgatatgaacagcgtccggttctgtactccggagatgctggacaaataccgtaagattcgtttgctgaaagattacgtagagcagacggaagcggtgatagaggagtataataagaaacatcatatcgacaattccgtccttgtcaacgggcgtcgtcaaaccaatctgggtgtgttccgggcctatctgaccgcttatctgaaaagtcttcccgatgtaaataaggaactgacctgcatggtgcggcagttgcagccgaccgaccacggtattcctatggaactttattttttctgtgccatcaaggactgggttccatacgagggagtgcaggcagatgtatttgaccatgtgttggccatcattcccgaattcgatttgcaggtattccaatcaccgtcgggaagggatttccaaagggtgctgtcttaattcctgaaggataattgggtgcagatgcttcatgggaattcggttgtgcgggcagaaaaaacatacagcctgcaaaagtttgaaccgttgcaggctgttgccctgataaactttataaagagaatttggaatgcgtgcgggttattttatccagtttcctttcatccagtcgcatgcggctttaatggcgtcgaaggaagcgtaggacagcgtagcatccactttgttgcttgttacggcggtgaagtcgtcgttggtgtaatctccgtcggatttcaatgcggcagtgacggtcatattggtgagtctggaagtaccgtttttcagcgaggcattcgttaatgcgctctccactaccagcggttgtcccttgccgcatactttggcattgtctatatcggcttgagtgccgcgacgcagacggatgccttgtttgctttcgccgttacctgcgaggatgaggtttttgagtacgggatgcgatacgggagtggctgcattgtcgttttcgttattgtccgcttcgatgaggcagtcgcagtcgtatcctaatgtggctttggcttcctgataggcaacgaggtcagtgccttttccgttccagccttcggtccagtcgaaagagtcgtcgctgcaacttaccactaccatattgcttacgtttaccgaaccgccgaagaactcgaagccgtcgtccgaacctttgtaagcctcgcagtggtctacaatcgtaccgttacctacaccgtaaaaggagattccgttggcttcatgttcttcgtcgaaggcaaacccggtgtattccagacggatgtactgcaatgttccggaattgtcggcatcgtcattgccgccatatacggcgccgcctatctctgaacttcctttaccgccttcggcattggtatgcgcttttccgcagatatgaatgccgccccatgctccgggttcctctttttcgctggtcatgacgataggtttgtcgggcgtgcctacggcattgattttggcaccttgcttcaccagaatatagtctacgatattgtcatagacagatataatctttactccttcttcgatgttcaatgtggcgcctgcctctacaatgtattcaccgctcagtttataggtgttgccggctttcagggtcacgtcttcggttattgtacctttcagggtactgccgttttctatcccgttgcctttgtcattgttgctgtcgttggtgttgtcatcgctgcaagcggtgagggacagcattccggctgcgagagccagcgaatagaatttcgatttcattgttttcataattcaattgttttaagttgactgttcgtctgtttgataatctatttaaaaggatttataatttgtagctgaagccaatttcaaagtcggtaccttttttatagcgctccacttccacttccgtgccggtggaaggtacttcctgcttaaagatgacgttacggttcagcaggtcgtttacttgcagtttcaggctgaaatgcctgttgaggtcgtatccggcactgaagttcagtgtgtgcagagtctgttgcttgatgtctcccagattggatacgcccaccgcatggatgcggctgccttgcagattgtagagtaaggcgaggttcagttgccgttcttcaccgaaacggggagagtaggtgaggtctgcattggccagaatgggagaggcgccttgcaaaggacgttccttgttggtgtaagcgccgccttcgggcagttttacgttggtatacatatagctgaggttagcacccaaacgcaagtcttttatcaattgtttgcggaattccacttctacgccggcagccattccgttgtccgcattccggaagctgtgcagggtagctccgccttgcaatgcctggatacgttctatcgggctgtcgaggtatttgaagtaaccggtcagagaaatcatgtctccgtttttgccgaagcgttcgtaacgcaagtcgaagttgtagttgtagccgttctgcaactcgtcgttaccgcggatttgtgccgaaccgtaggattcctgatagaggaagggagccatttcgatgaatgatgggcgggtaacggtacgggatgcggagaaacggatactgttggcgtcgtttattgtgtacttcagatttagggtggggaagaaatcgtttttatccagattgcgccgtttggcataccagtcgccgccgtcagtggcatagtccacccactgtttgcttatttcgtagcgtacgccgaggtttacaagtaatgacggtacggggtagaagtcggtcagcaggtatccggagtaaatttcatttcctgcgcggtagctgtctttgggttgcatcacgcgttgtaccgttacgtttccgtctgctatgttctcttggttcaggaagccgtctgtatcgtagatgtcggtaacggtgggattaattttgttcaggttgtagtagaaacgggttgctttgtagtcgcggcttttattcttatagttgaagcccagtttcagaaaattgttttcgttccacttccagcgcagggcgaggttgccgttccactctttttcatccaggctgccgaaatagcgcatggtttcctggcggttcagtttgaacaggccgagtgtgccgtcatcattctttatatacatcacttggcgtctgtccggttcttcgcttcctgtcttgctgtacgagccgccccaggtcagttcccaacggtcttgttcgccgaagttgtgaaggccgttcagttggtggttctgcaaagtgtagatatgtgtgatgttattgcttccggtcagctcgtggtcttcggcatctgttccctcgcggcgttggtaagtgtctgtggcattacgcgtgtagaagaaagtatagcctatgcggtcgtgccggcgcagcgtgtagcctatgtatcctaatgcagcgagtttcagttcttgggcatagctgtcgtatgagaagttgtcctgtacattgccggttgcttccagggttttatagaaagcgttgtccatattctgatagccgttgccggcgcttacggatgccagtatgctgagcgtttggctgtcgatgctgatgttcttgccgaagccgaggttaccgttaaagtccggcagggttgatttcttctttacggcaaacgaggtgtcgaatatatttctggtctttacatagttgtcaaaatccgacagagacatatcgagtgccgcctggtccacaccggaagtcttgaacaatgagccgttgcggttcatctgatagcggtctttgcccaaggtattgaacttcccgccggtgttgaaactgatgctgaagaaatcttcggcgatgttctctttggtactgatgtctatatgtgcacctgaataatcggcaaaggcttccgcgttatataccttgctcacggtgatgttctgtatggtgctcgatggaaatagatccagcggaatcagcttgttgtcgggattgggagaggcgatggggaggccgttcagggtagtcgtgctgtatcggtcgcccaatccccgtacaatgagttggccggcatcggcaatggagataccggtaatcttttttaccccttcttccacattgcttatacctttgatgctcatctcttttgagccgatgttttcgatggcgagcgtcgctttccggcgttccatttgcagggcacgttcgccttcaaggtttttccgggccactacggatacttcacccaaagcctgtgcgtcgctttccagttcgaagttcagtatgacatcggctttgcctgtctttacattgtttacaacgatgtctttgtagcctacatatttaatggataatgtgtaaatgccgtttgttacattcagggagtagtttccgtccatatcggcaatggcgccttgtgtggttcctactatctgtacggtagctccggtcagcggttcccgggtctgtttgtcggtaatggagcctttgatagtacctgccatgactgtcatgacagaaagcgtaaggaataaaataaggaagaaaatctttcctaaatctaattttgtactcatctcttttatgcgtttcttaatccgctgcaaagatgcgccgaacgtgtttcaagagtggtacatacgttatacattctattttcgtttgtattaaggagttgttacgtaatccggaaggttctcatttgaaaattgctaatgtgataaagtcacttcaatcggttgcgtatgtttgcggtaaacctggatagcagcgggctatgaggagatatccaaaacgaaatgaagcccaaaagcggtaaaaacttttgggcttcactcttgccgtattgatttattatactccgctgaatgcgctgaaacctccgtcgataggaagcaatgcacccgtaacgaagctggcggcatcgctgcacaggaactgtacggcgccgttcaattcgttgatgtcgccgaagcgtttcatcggggttttggccaatactttcttgctgcggtcggtcagtgagccgtcggggttgataagtacggcgcggttctggtcgccgatgaagaagcccggggcgatggcattgacgcggataccgtctccgtatttcagtgccagttcgcttgccagccattgggtgaagttggcaacggccgtcttggctgccgaatagcccggaacgcgggtgatggcgctgtaagctgccatggaagatacgttgacgatgcagcccttaccttgcttagccatcactttgctgaacactaaagacgggtaaacggttccgttcatgttcagattggtcactttctcccagcaggagatgtccatgtcgtagaagtgctggtcgggagccagagttgcgcccggcatatttccgccggcaatgttgagcagaatgtcgatacgtccccacttggcaacgatgtcatcggcaagttgctcaagactggcgatgtccagcacgttaccgacgataccgattacatcttcaccataggttttcagttcctttacacgcttgtccagttgttcctgacggatgtctaccgctacgactttagcgccttgttgcataaaacacttggcaatgctgccacccaatacaccacctgcaccggtgataaccgctactttacctgcaatactgaattgttcgttcataatctttgtctccttttttctttcttttctttttttatacggggaagcacgtgcataaagcatgaagcgtataccccctcatactttattgtcttctgcttcacgtatctatattgtatattttatgcttgtgtttccttctgtttcatttcgtcttgtaccactgccatcatgccttccacctgtgccagcgccagcatacggccgtggaatgaatagccgggattatatcccttgtcctcatcgcccagcatcatccgtccgtggtctacacgcatgggcagattcgggttttcttgctcgaagatgcggataaggtcgataaggtgaccgcgtcccgtcaggtgggagctttctatgaagttgccgcccggcatggctgcggtgctgcgcagatgtacaaagtgggtgcgtgatgcaaacttcctggcgagttcgcgggtgtcgttatgctctcccgcactgagcgagccggcacagaacgtcagtccgttgtgtggattatccactgcattcaggaaccaggtgatgtcctcttcgttggtcacgatacgcggcaagcccagtacctggaaaggcgggtcgtcgggatgtacgcacatatttacgccgtactcctcgcacaccggcatgatggcggcaaggaaataccgcatgttctcgcggagcgcatcgcggtcgatacctttgtacaaggcaagcagatttctgaatatattcaccggattcttgtcgccttccttgatgttgccgtttacgaatccctgcgtctttacgataatcgcatcgacaaggctgtctttttcggtttcggtgatggtcttgtccagttcggccactttagccagctcttcggcggagtaatccttttcggctccctcacgttgcagaatgcgcaggtcgaaataagcaaaacgcacccggtcgaagtagagcgatgaggttccgtctgcccaggggtgttgtaaatccgtgcgtatccagtcgataacgggcatgaagttatagcatacggtctttacaccgcatttgcccagattggcaagactgattttgtagttctctatcagttgttcgcgttccggtccggcatatttaatggcctcgcatacgggcaggctctccacaaccgaccagcgcaagccataggactcgatatatgtctttaaatcgttgatggcctcttctgtccagatttcgccgttgggcacatcgtgcaaggcggtaactatcccttccacaccgatttgccgaagcataccgagcgttattttgtctttcttaccgaaccatctccaagtcttttccatacttctttttgtattaatgatttaaaatgattatttactgcaaatgtaggcactaaaacagtttgtatataaacggatatttgcaggatgtttgcagatatttgcgtgtattgaaaggataatgggatagtaacctttgctacgaagtaaacagctttaaatcaatagtatataagtaccaatataatacctgcgtttggtacgggaaataccaacggttggtacgccttgtaccgcactttggtacggctcctaccacagtttggtacagctcgtaccacgctttggtacagttcataccacgcttcggtacgtctcctgccaccggttggtatgctccgtaccaaccggggtattctttccgtttccctttgtattttcttttttcccgtagacttattgttattattcgctatctttgtgtaaggataggatgcggctcggcaaaccgggagatgccgtatcaacatcaggcagtgttatgagacagataataaacgaacagctccagatatcggagtccaacccgataaaggcgcgctattacgactacgaccgcttcacttacccctggcatttccacagccagtacgaaataatctatgtgaagaaaagctgcggccgttgctttgtgggcgattgcatagagtgtttttcggaaggagatgtggtattgttcggtcccagcctgcctcattatatgcggagtgacgatgcttatcacggcgataatccccggttgcgggtgcaaggaactatcattcagtttgaggagaacttcatgcaatactcgttcaaccattatccgcagtttcaccagatacgggtgttgctgaaagaggccagacggggtgttgtctttcacacggccgatgccggtgcggtacgcgacatggtatccgcttttcccgaactgaaaggattcggacagataaccggtttgctggatttattgcaggcattggcggtatccgtcccaagaaggatgctggcaagcccttgctactatgagaagtttcccacagcgggaaacaagcgtatcgataaaatcatctcctttatcaatagcaactacacccgttccctcaagctcgacgagatagccgaaatggcgaatatgaacagcagcgccttttgccgtttcttcaaggacgccacgggaaagactttcctgcaatatgtggcggacatgcgcattggttatgcctgcaaactgctgaccattggcgatatggagatttcgcagatagctgtggagtgcgggttcgactctattccgcacttcaaccgcaccttcaagcaactgacgggactgacaccgacgcagtaccggaatcagataatgaaatgatttccccccttcaccctccgtctcccataaacaggagtgtgcgaaagggtgaaggggggatgtggtaaaagttattttacggaatctcgaccgttacataccgaacgagaacttgtcgatggactggtataccacgctggcaatactcagcgccacgatgcccagcgtacagatggcaaggccggcacgcgtgtagttatcgctacggaaagcggcgataggctcatcgctcttgttgatgtacattgcctttacaatcttcagatagtagtaaagcgacagaatcgtattgattaacgcaatgaacaccagcagatgaaaaccgctttcgaatgccgccgcaaagatgaagaacttcgagaagaagcctgcgaacggcggaatacctgccagcgagaacagtgccagcgtcataaggaaagccagcttagggttggtggtgtacagtccgttgtaatcttccagtgtaaacttatcggcgcgcaatgctacaatcgtgataacggtaaagacggcgaggttggcaaacaggtaaatcagtacgtagtacaccagcgacgtcatacccagcgacgttccgctgataacacccagcatgatgtaaccggcttgcgagatactggagaacgccatcaaccgtttcaggttctcctgacgcagcgcaaagaggttggcgagcgtgatagaggcgatgataacccagtagagcacttcctgccattgcgtcgccatcggtgcgaataccttatagaggatggtcatcagcacgaatgccgccgcacctttggagataacgctcaggtaagcggttaccgtactcggagcaccttcgtatacgtcggccgtccacaggtggaaaggaaccagcgaaatcttgaatcccatgccggagaagaagaatacgaatgccataatctgcaacgggcttccgtccagatgtgccggaatatcggcaaagtagagtgtgcctaccgtaccgtatatcagcgaaaggccgtaaagcagcagcccgctggagaagagtgcggtaaggatgtacttggcgcctgcttcggcagagtggtggcggtacttgtcgaaagccaccagcgcagccatggggatgctggccgtttccagtccgatgaagaacatcaggaagtgcccggcggaaatcatgaagtacatacccagcagcgtggagagtgtcagtacatagaactcgccctgcttgattgccgcatcggggcggcgcatccactcgtgcgccataaggaacacgatgagcgtacctacgctgagaatggatttgacgatactctgtatcggctggttatggtacatcccgccgaaagcgtcggccgccggaccgggaacgatggttataagcgtatggacgatgagcagggcaacgggcagcatggtgttcaacatcggcttgccgtcatgcttgtgcgcatccggactcatgaagaggtcggctatgaagaggataacgataaccgctatcagcgacagctcttctttcattaatagaaattgggagtaatccatgttatttggtgattagtgattagtgtttagtgagtggctaataggttgactaccggcagcacgctgtctccaatcatgttgcttatccacagcggagcaagacccagtccggctacgcaggcaatgaggatgattacggcggtacgttcgtcccaggtggcatcggtcaatgtcaggtggtgcttgttggtacaggttccgtagaggattttaccgacaaggcgcaggatgtagactgcggtaatcacgatactcgtacaagcgatgacggtccatgcgcggtggaaggtatcgggatgctggaaagcgccgttgaagattgtcatttcggcaatgaaaccgctgagtcccggcagaccgaggttggccagaccggcgatgacgtaggataccgccaggaagggcataatcttcatcagtccgctaagctcgcgtacgtcgcgtgtgtgcgtccgtccgtatatcataccgataagggcgaagaacagggcggtcatcagtccgtgggaaagcatttgcagcacggcacccgtacaggccgtccggttcatcatcaggatggcgaaaagcaccagtccgcagtgcgatacggaagagtaggcattgatgtacttcaggtcggtctgcacgcaagcggagaatgcgccgtacaccacggagatacccgtcagtacgaggaatatccagccgagctcctgtgcggcttcgggcatcaggtacatggcgatgcggaaacagccgtagccgcccagcttcatcagtacgcctgcatgcagcatgctgacggcggtaggtgcggatgcgtgaccgtcggggctccaggtatggaacgggaacagagcgcccagcacgccgaaaccgaggaaggtaagcgggaaccagatgcgttgttgctccacggggatattgtgcagttgggctatctccagcaggttcatggtggtggcgccgctaccgaagtagataccgaggataccgataagcaggaaagcggaaccgcccatcagcatcagcgtcagtttcatggcagcgtattccttgcgtcccgaaccccatacgccaatcagcaggtacatcgggatgagcgctacctcgtagaacatgaacatggtgaacaggtcggtcgagataaagaaaccgaacacacccatcgacagcagggtgaaccacaggaaatattctttggtcagcggttgcagacgccaggaagcgaatgtacccgtaaacacgataatggccgagagcagcagcatggctaccgagatgccgtccacacctacggaatagtggatgttgagggcgggataccaggctacatcggcacggaacagcatttcatccgtagcgccgccgtgacgggcttgcaggtagacgacggtcagtccgacggctgcaacgagcaatgccgaagcgccggctaccatcaccgcacgtatctgtgcgatattacggctgagccagaggcccaacagcatcagcaaggggatgagtacgaatatggataagaaattcatctttataatatggtattaattgttattgttctatatggttgatacatcactatcaatttccgtttctcgtttacagcaacagcagcagtatcagtgcaagcgtacccagcaggaatacgaaggtgtattgctggatgcgtccgctttgcaggccgcgtatctcgtcgctggtggcattggcgccccaggcaaggaaatcgaagaagccgtccaccacatgacggtcccaccaggcaatggggcggctgatgcagccgaagatgatgcggtgggtgatgaactggtagacctcatcgatgtagaagcggtgataggctgccgtccacaagccgttgaagcggcgggcaagcgcatcggcaaccggctgtttttcgcctttatacataaaagtggccacagctatggagataaccgcaatggcaatgcttgttcctgccacgccccagtcgaggtggatggtataggcttcgccgttggagctgacgaagtggccgaaaggaatgaatccggcaactatcgtaactgcggcaaggaacatcaggggaacggtcatggcaaggggcgactcgtgaggcgtgtgctgatggctgtggctttcatcgcttgccgacttctgccccggctccgaactgccccagaaaatgccgtaatacagtctgaacatatagaatgcggtcatggcggcaatcaccgtcataatccaacccatgacggggctgaaccggaagcaggctgtcagtatctcgtccttggagaagaatccggagaacgggggaatgccggcaatggcaaggcaggctatcaggaaagtgatgtgcgtaaccggcatgtatttacgcaggccgcccatggcggacatctcgttgctgtgcaccgcatggatgatgcttcctgcaccgaggaacagcaacgccttgaacatggcgtgcgtaaacaagtggaacatgcctgccatataacccagtccgccttcgtgcgggtctgtggatgtacatacgccgagcgctaccatcataaagcctatctgcgagatggtggagaaggcgagtacacgcttgatgtcactctgcacacaagccacgctggcggcatagaatgcggtgaatgcgcctacataggccacgaggtgcagcacgtggggcgcatagtcgatgaacagcgggaacatgcgtgccaccaggtatacgcctgccaccaccatcgtagcggcatgaatcagtgcgctcaccggagtaggaccttccatggcatcgggcagccagatgtgcagcgggaacatggcgctcttgccggctccgccgatgaacatcagtcccagcgccagcggaatcatggcagcgccgcctttcagcaaggccatttcattgggttggaaggtgtaggttccggcatagtaaccgtaaaccaggataccgataaggaagcccaggtcggcaaagcgggtcacgataaacgctttcttgctggcggcgattgctgcgggtttcgtgtagtagaagcctatcagcaggtaggaagacacacccaccagctcccagaacagatacatctggaagatattggttgccaccaccagtccgagcatggacatcgtaaacagcgagaggaaagcgtagtagcgttggaagccgcgttcgcctttcatatagccgaaagagtagaggtgtaccatgaacgatacggtacttatgacaatcagcatcatcaccgatatggggtcgagcaggatgcccaggtcaatgctgagtgtcggcgtaaacggcagccatgtacagttgtaaggcatcagtgtggcaaatgtgccgtctgccagccgcggggcggtgaaatagtgtattgcggtgaggtaggagagtaccgccactgcacccagcacagccgtgccgatgagtccggcagtgcggtgcgacatccatttgccgcccagtcccaacacaaggaacgagagcaaaggaaggagaaggattagaatcgtatattccataattattgaattgagaattgaaaatggagaattgagaaatgctgctcagtctctctttttgtttttattgaatggctcattatgcaggcggtctgcacaactctatgcagggtgtctgcacagtgctatgcaggacatctgcacaggcttatgcaggatgcctgcacaggcaatctaccatttgagttcgtccagcttgttcacctgtatgctgcggatattgcgatagatgttaatcatgatggcaatggccacagccgtttcggctgccgagatggcaatggagaacagggagaagaagtaaccttccagtccgccgggaaacaggaaacggttgaataccgcgaagttgatgtccgtagcattcagtatcaactcaattgaaatcagtatcgccaacgtattgcggcgggtaaagaacccgtagatgccggcgaagaacatgatagccgagactatcaggtaatattccatgtgtatcataaatcttatcttttacgtgctattaacaatccgcctacgatacatgccagcagcaggatgctgacggcctcgaagggcaataggtaaccgtatttgtcgccgctcagcatgtggtggccgatggtcttgatgttgacttcgagcggttcgatgtctgtggtggcgatgaacttatgtttcagggttatgaacagtacgatgacggctcctgccacggtagcgcccagtccggcaaggaacttgctgcgtttcagcttggccgccatgtcaccttcgccgctggtgagcagaatggagaagacgtagagcacgacgataccgcccgcatagaccataatctgtaccgaaccgaggaacgtatatcccagcaggaagtagatgcctgccgtgccgaaaagcacgaacagcaggtatgtggccgaacgtaccatgcgtctggtggttaccgtcagtatggagaatacgctgatgaaggccgcaaggaagtaaaatactattgtttcaagattaaattccatgttattgattactaattatgaatgactgattacttcgctgcttcaggctggggagcggcgggtttcttcttctcttctacgtgactgcccggatggttcagcgtcagtaccagtttgctgcggtcgaatacggcatgctcgaagttctggtcgaacgtaatggcatcgtgcgggcaggcattgacgcaaagctggcagaatatgcacgaaccgaggtcgtattcgtacttcgccaatatcttctttttcttgccgtcttccgtttctatcgtctggctcgtcaccttgatggtgtcgttggggcaagccgtctggcacaagccgcaggccacgcaatggtgttcgttcttctcgttgtggggcattgtcagcgtgccgcggaaacgttcggagagtttcagcgtcttccggttttccggatactgttcggtagtcttcttccgccagaaaacggtcatggtggttttcatgcccgtcagcagggaagtgataccgtgtatgaggctgcctatgtaagaattatgttctttttctttcattgttgtaattattatttagtgttgcccgaaaggaaatattgctccggtgctgtgccggcttagaaatgcaattcaaatactacgattaataccattagaatcaggttcaccatgctgatgggaaccagatatttccattcgaggttcagaatctggtcgatacgcagacgcgggaatgtccatttaatccacatcagcaggaacaccacgaagaatgccttgccgaagaaccatacaaagcccggaatgtagtccattacagcgttgaagccgtccaggccgacgatgtgcaacggcatccagccgcctaagaatatcgtggctgccacactcgctacgatgaacaggttcaggtactctgccaggtagaagaagccgaagcccataccggagtattccgtatgatagcctgccgtcagctcgctttcggcctcgggcaagtcgaacggaccgcggttggtttccgcattgccggcaatcaggtagatgatgaaagctatcagagccgggatatgtcctttgaagatgaaccagccgtcggcttgtccggctacgatttcggagaactgcatcgtacccatcaggactaccatcgtcaggatgctcagtccgcacgagagttcgtaactgatgatttgcgcaccgcttcgcatggctccgataagcgagaacttattgttggaactccagccggcaagcaggatacctaccacgccgatgctcgaagcggcaagcaggaagaacacgcccacgttgaagtccagcacttccaggcctttgctgacaggcaggcaggcgaaggtgaggaatgaggctatgatgaccatgaacggcgccaggttgtagaggaatcggtcggagaacttcaggtcgatgatttccttggtcaacatcttgataacgtcgcatggcacttggagcaatccccattttcctacacgcatcggaccgaggcggcattggaaaaaggcgcatatcttgcgctccatgtaaatcaggataatggcaagcactgcatacatcaggatgatgcatacgcctatcactacacattcaagaaacaccgccagaccttccggcatgagggaggtcagcatctggtgaatccaattggttactatactaaagtcaaacatctgtttatttacggttttacgatttacgatttgatgtatgtctgctgtctgttattgacgttctttttgctttttaccgttatcggtcgatatcgggtactacatagtccaatgtaccgccgatagcgataaggtcggcaatctttgcaccgcggcaaatcgtatctacggtagataccagcggaagccccgtgctgcggaagtgcaggcggtagggtgtcttgtcgccgtggctctcaaggaatacgccgaactcgccgcggctgccttctacggcagcgtagtaagtgccttccggtacgcggataatcggtttcatcttctcctggtatgcaccttcggggatattgtctatcagttgttcgatgattttcaggctctccatgatttcgtccatacggatgaggtagcgtgcccaggagtcgccctcggtgcggacaatctctttgaagtccaccttgtcatacaccccgtaaggcatgcgcttgcgtacgtcgcacgcccaaccgctggcacggcccgtaccgccggtggctccgaacgctatggcatcttcacgggagagtacgcctacgcctttcagacgctgctgcgcaatgatgtttcctgtaaacacgtcgtggtattcgtgcaggatgccgcgcaggtatgggatgaactctttgactttcttctggaagtcgggggcgatgtcggcttgcacgccgccaatcgtgttgtaattcatgatgaggcgtccgccgcaggttccttcgaagatgtcgagaatcttttcacggtcgcggaagccgtagaagaaggcggtcagtgcaccgaggtccattgccaggcaggagtagaaaagcaggtgcgagtcgatgcgctgcaactcgtccatgatggtacggatgtactgcacacgttcgcttacctctatgcccatggctttttcgatacacatacacaaggcatggcggttctggtgagcgcccaggtagtccagacggtcggtcagcgccagtgtctgcgggtatgtaagactttcgcacatcttttcgataccccggtggatatatccgcagttggcatcgatttttttgatgatttcaccttccagcgatacgcggaaacgcattacgccgtgggttgcggggtgttggggaccgatgttcaccacatattcgtcgtcgccgaagagttgcgtttccttgttctttaccgttccgtccgggttcagttccagttcggtggtggtatcaaccgtttcctcattgtccatgcgcagcgggttctgtgcttccgggtcatcgtctttacgcatcggatgccctacccagtcgttgcgcaggtagaggcggcgcatgtcggggtgtcctacgaataccacgccgtagaagtcgaacacttcacgctccagaaagtctgccgctttccagatgtcgcatacagagggaagttcgggatgctcgcggttgagtgtggcggtgcggatggcagtccgcttgccggtgacggtggattccaactgatacaccacgccaagtccgcgcggagtgtcgggagtgtctttggcggcatctggttcgccccagtccataccggtgaggcattccagaaagtccatttgttcttcctgccgcaggcgcagcatttcgtcatgcaaggctgcgggttctatatatcttatttccatactcatattcatattcattcttccggtctttcttctttttggtttacaccgccaaagtatttctctatttttactttacgctgcaactgcatcattccgtagtagaatgcttcggggcggggagggcatccggggatatatacgtccaccggcaaaatcttgtctactccgttcacaacgtggtaggacttcttgaacgggccgccgctgacagcgcaaccgcctacggctatcacatacttagggtctgccatctggtcgtacaagcgtttcagcaccggagccatcttgttcgtgattgttccgcacaccataatcatatctgcctggcgcggactggcacgggctacctcaaacccgaagcgcgccatatcgtagcgggctgcaccgagggccatgaattcgataccgcaacaactggttgcaaacgtaagcggccacagcgaattgctgcgtccccaatcgatgaaatcgtccagaacgccgatagccacattagcgccgccggcattaagttcccgaaccaatttctccaacgtttcgttgtctgtaaactcctcataagggatggattttattttgggtttcttcgttacttccattccaacgctcctttcctccaggcatatgcaaggcccagaaccaatataataaggaaaaataaaatactgaaaagtccggcagctcccagctcgcgtgctatgactgcccacggaaacaggaacaccgtctccacttcaaacatcagaaacaggatggcaaacaagtagtaacctacccgaaactgcatccatgatttaccgcgggtgggaataccacattcgtacggctccattttctgcacattgtacgaacggggggctatcgcattggacaatgcgatgacgatacccacgaaagcaattgccgtcagcaagacggctaccaacaaagtaaagttcataaatccgataagattttagatatataaaatatagatatactgcactaaaacaaggataaagcgataaggcgacaaggtgataatgctttaccttttttttaaatgataatcttccttaacccgattatgtaataatgcggaccgggcacggtaagacagtgtacattcggcatacggtcatagctttgcgcacgcagcagttgctgcatacggataatatcagtgcgcaacagggagcttttgttgtttggaacctgctggctttccacatgttccaggcaagaagcggcggatgatgtatgtctgtaataattatgaatgacctgttgggcggtaggcgcctgcgtcaaaatgcaactctctgctttgcaaccggccggagcgcacaaaaaatccgcagcctctattgcaccgttgtgtaataaaaccgcgagtatggctatcatacaatattttatgcactgtttcatacctccctatctgtttcagggcgcaaagatataacaagtatctctcattttgctatctctgcataacaaaataagactatttttacactttttatcctaaatcaattccgtttccagaattccggggtgaacaaaagtaagacggtaaacaattccagacgtcccaataacatgaggaatgacagtaaccatttggcggcatcgggcagggcattccatgaatatgccggaccggtatcacccaatccggggcccatattgccgatgctggatacaacacagccgatggactcttcggcacctatccccatccccatcattatcagtatgctgatgatgataatgataaaatataaaaagaaaaatgccaacacggtggatacgatggaaggggggattacttgtttgtttatacgcaccggcaacactgcgttgggatggaggaggtgcttgcactcattgcgggatactttggccagaatgaccatacggatacatttcagaccgccggaagtgctgccggcacaagctcccatcaccatgacaatggtaagaagtccccaaagcacaggtgtccataacatatagtcgtctgtggcaaagccggtggaggtgtgcagcgatatgacctggaacaatgatttgcggaaagcctcttccgcatccattgaaccggtataatagagcactacggctatcacaccggtaaagcctgctaccgaccagaaataccatttcagctcggcattgtcaattacctttttgaatttccggttgacaaagaacagcaatagcgtaaagttgatgccggaaataaacatgaaaatggagattacatattctatataaggagaattgtaataggccacacttgcctgcttggtggagaaaccacccgtgcccgtagtagcaaaggcatggcatacgctgtcgaaccagttcatgccgcccagcattaacaagactacaagtatgagagtgagtccggcatagatgctccatatccatttggctgtgatgccgatgcgcggatgcaccttgtcgtgcgtgggaccgctggcttcggcggcaaacacctgcaggccgctgaccccgaagatgggtaatacggcaatcgtaaacatgataattcccaaaccgcctatccattgtgtcataccgcgccagaacagcaatccgtgaggaagcgattctatattatccagcacggtggctcccgtacttgtaaaaccggacatggtttcaaagaaagcattcgtgatgtcagggacatatccgctgatgtagaaaggcaacataccgaaaagagaaaaagccacccaggcaaagctgaccaggacgtaaccgtcgcggcgggtaagttgtttctcaccgccttttccggcgatagccatgagcaggcccactcctgctgtgatacctgccgatttccagaaatcgaggagggcttcgtcattatagtagtacgatattgccgaacatgccagcaacatgactgtctccagcagtagcagaataccgataatccgtataattgtcttaaagttaatcacgcttgtttggattttaagtcgttaattttgaattatgggacggggcgcaggtgcagccaattcataattcagaatttataactcccgattaattaaagtatttttcgattttcttaatcatcatgttcaggcagaataccaccacgtggtcgccgggctgtatttgcgtgttacccataactaccacaccctcgccgttgcgtatcagtccgccgatggttgtccctttgggcaggccgaggtctttcaccggatgtttggttatctttgaacctgccttgacggtaaattccgctacatcggcattggcaaaggtgaggcattttacgttgcttacatcggcatccagcatcatctggtagatatggctggcggcaatcatcttcttgttgataaccgtgccgatgtcgaggctttcagccatgcctatatagtcgatattttctacttcggctacggtttttcttacacccatgcgttttgccgccagacaggcaagaatgtttgtttccgagttcccggtcagtgccacaaaggcttcggtattcttcaatccttcttctatgagcaggtccatatcccgtccgtcgccgttgataatcattgtcttgtcatccagcagttcggtcagacggttacagcggttcaggtcgttgtccacgattttcacctgcatatagtcggggacatattgtgcggtacgtacggcgatgcggcttccacccataatcatgacattgcgtacgtcggcataatcttctttgcctgctatcttgcggatgtatggtacgaatttgcgggtggtcgtgaaataaacaatatcatgcagtttcacaacatcatcgccgcggggaatcagtgtttcgttaccgcgcttgatggccaccacatgataaggcaattccggtccgcccaactgatgcagggggatgttcaggatttctgctttttcgcgcatcttggcgcctatcagaatcaatgcgcccccgcaaaattcccaccattggcgtacccagctcatacggatggaagatacaatctcttttgccgcaagcatttccgggtagataagcgaatctactcctaacttctggaaaaattccttgtttttgggcagcagatattcgtaattgtcaatgcgccctacggtttttaccgcacccaggttggttgcaagcatacaggcggtaatgttacggctttcgtcgggagtaacggcaatgaacaggtcggcctctcccgctcccacctctttcaatccttttatggaagtgggggaggcgttaacggtcatcaggtcgaagttggaactgagcgtgctcatcctttcttcgttgtcgtctattaatatgatgtcttgcttctcgcgcgacaatagtttggccaaatgtgtgcctactgcaccggcacctgcaatgattattttcacaatgctttaagaaatgaagaataaagaatcaggaatgaagtacggaggcttgcataatgcaacccggttcttcattcatcattcctcattcttaattaatatattatagattccttcttcgtccattccgcacagccggtgcagctcctgtaccgtaccatgttctatgaatgcgtcgggtacaccgatgcgctcgacgtgcggggtatagttgttgtctgccatgaattccagcacggcgcttcccatacctcctttccgtgtgccgtcctctatggtgacgatgcgcttgaagttacgtcctgcttcatgcagcaatgcctcatccagcggtttgaggaagcgcaggtcgtaatgggctatggagagccctttttccgcttctgcccgttcgatggcgtgtgcggcagtatttcctatcggtccgatggtgatgacggcaatatcctttccgtccttcagtttgcgccctttgcccacggggatttcttcgagcggacacttccagtccaccagtacgcctcgtccgcggggataacggattacgaacggacctttgtccggcagttgtgccgtgtacatgagacggcgtaattcatgttcgtccatgggcgaggatatggtcaggttcgggatagggcggaagtaggcaaggtcgtatacgccatgatgcgtcgggccatcctctcccaccagtccggcgcggtccagacaaaggacaacgggcagcctcaggagggcaatgtcgtgtatcacattgtcgtatgcccgctgcatgaaagacgagtagatgttgcagaaaggttgcatgccttcctttgccatgccgccggagaatgtggctgcatgcccttcggcaatgcctacatcgaatgcacggtcgggcatggacttcatcaataggttcatggagcatcctgtgggcatggcaggagtaactcccactatcttcggatttttctctgccagttctaccagcgtctctccgaacacggtttggtacagagggggcaggttgctggtgtcggtggtgatgcgctctccggtttcggggtcgaatttgcccggtgcatgccagatgcccgggtctttttcggcaggttcgaagcctttgccttttacggtgtgcagatggagtattttagggcctttcaagtccttgatgtcccgtaggatgcgggcaagattcttcacatcgtgtccgtttatgggaccgaaataacggatgttcatcccctcgaagatgttctgttgttgggctgccattgatttcaggctgttggagaagcggatgagcgctttgcgccggtcctcgttcagcacacccattttgaacagcattttggatgctttgaagcgtagctggttgtagcggttcgatgtagtcaggttgaagagatattgcttcatgccacccacactgcggtctatcgccatgtcgttatcgttgaggataatcagcaggttgttgttggtggatgaggcgttgttcaacccttcgaaagccagtccgccgctcatgctgccgtcgccgataacggctaccacatggcggtctttctcgccttttctggctgccgccacggccatacccaaagccgccgaaatagaattggaggcatgtccgcaggcaaaggtgtcataatcgctttctacgggagtgggaaaaggacgtatgcctttgaatttgcggttggtgcagaaagcctcgcgacgtccggtgagcatcttgtgcccgtaagcctgatgccccacatcccatacaatgcggtcgtatggagtgttgtagacgtaatgcagcgcaacggtcagttcaacagtgcccaggcttgcggcaaagtgtcccggattgcaagaaagttcttgaatgatgtcttgtcttaattccttacatatctccggaagttgttccacgctcaatttgcgcaaatcctccggataagaaatggaatttagcaagttatatgttgttgactctgttttcatcactgtactgaagattacaaaatgcaaaaatagcaaaagaaaacggatggctgtatcattttgtctgttttttgttttgccacttgtcttttgcgggaatttgtccggacgttttcgcctcttttaacagaaatgctttccctttgcgaagcgagtcttctggattggcgtacgggatatgtccgacacccgggtcttggtatatccgacacccgggtcttggtatgtctgacacccgggtcttggtatgtctgacatccgggtcttggtatgtctgacacccgggtgtcagacacggtgttcttgcatacgcggatatgtatagttgcctgaagaagcaacggagcatgtcctttgcggtttttagaaggtgcttttccggtttttgcagtatttctttgtatctttgcagctccattgaattaagttacgtatgaacttcattactcctgtcgaacttcccgcccatctgccttgcttgcggcatacggaccacttgctgctgctgggctcctgctttgcagccaatatgggcgcaaggtttaccgaagcgaaattttcctgcgatgtcaatccttacggcgtactttataaccctctgtccatatccgccgctttgcgtgaaatcgtatttgggaaagtgtatggtaaggaagatctgtttttctttcgcgattgctggcatagtcccatgcatcacggagatttctcgtcaccgttggcagacgaaacgttgaagagaatcaacggacggattgccggtgcgcacgaacagattttccgttcggcgtgtttgctgctgactttcggcacatcctgggtgtacgaacaaaaaaatacggggcgtatcgtgggcaactgccataagctgcccgagaaggagtttacccgcaggcggctgatagtagatgaaattgtgtcggactatgtttcgctgctatcggggctgttggcgcgcaactccggattgaaggtgatatttaccgtcagccctatccgccatgtacgcgaaggcatgcatgccaatcagctcagtaagtccgtcttgctgctggctgtagacaggctgcaagctgcttttccggagaatgtattctattttcccgcctatgaactggttttggatgaattgcgggattaccgcttctacgctgaagatatggtgcatccctccgaagtggctgtgcagtatgtgtgggaacgcttctcgtccgcctgtttttcgccggagacgttacagatcatagaagaaagtgaaaatatacgtagggcattggcacacaagccctttcatcccgactctgaggagtataagcgttttttaggacaaattgtgttaaaaatagaccgacttaacggaaaatacccgtacttagacttccaaaaggaaagagaattatgtcatacacgattgaagatatagctcgcatcatcggcgcgcggcggataggggataggcctgccgctatcgactggttgcttacagacagccgttccctgagttttcccgaagaaacactgttttttgccttgcctacaaagcggaatgacggtacccgttatatccgtgatttgtatgcgcgcggcgtgcgtaattttgtggtcagcgaagagaggctgaatgaggttggaatcggagaaccgaaagttgaagacgccgcacggcaggaaactgtggatactgctgcgatgcagccggctttcaacttactggtcgttcccaacccgttgaaagccttgcagaaattggcagagcaacatcgggaccggtttcagattcctgttatcggcattacaggcagcaacggaaaaaccattgtgaaagagtggctgcatcagttgctgagtcccgaacggatgataacacgctctccccgcagctacaattcccagataggcgtacctttgtccgtgtggcagatgagtgaacaaacggagcttgccatattggaggccggtatctcggaaccgggagaaatgcgtgccttgcagaatattatcaaacctacaatcggtatcctgacaaatataggaggcgcacatcaggagaatttcttctctttgcaggagaaatgtatggagaagctggctctctttaagaactgcgatgtggtgatttataatggtgacgacgagtttatcaacaattgtgtgggtaaatccatgcttgccgcccgtgaaatagcatggagcaggaaagatatggagcgtccgttatatataagtaaagtggagaaacaggaagattccactgttatttcctatcgttatttggatatggacaatacgtttacattgccttttatagatgatgcttctattgaaaattcgctgaactgcctggcggcttgcctgtatctgatgcttcctgccgaacagataacggaacgcatggcaaagctggaaccggtagcaatgcgtttggaagtaaaggaaggcaaaaacggatgcctgctgataaatgacagttataactctgatctcggttcgttggatatagcgcttgattttctgtaccgtcgctcgcagagtaagggtctgaagcggacgcttatcctttcggatatattggagacgggacagaatacgccgactctctaccgtcaggtggcacagttggtaaacagccggggaatagagcgcataatcggtgtgggaaatgaaatatcttcatgtgccgcacggtttagcatcgagaaggctttttatccggatacggctacgctgattgaagccattggccggggagaactccggctggagaatgaaataattctgattaaaggggcgcgtaagttcggtttcgatgcgttgacggaagccttggagaagaaagtgcacgaaacgatattggaggtaaatctcggtgcaatgatcgctaatctgaatcattatcgcggcaagctaaaacctgaaaccaaaatggtgtgtatggtgaaggcttccgcctatggcgcaggttcgtatgaaatagccagaactttgcaggaacatcatgtggattatctggctgttgctgttgccgatgaagggtcggatttacgtaaagcgggcattacggcaagcattatcattatgaatccggagatgacggcattcaagacgatgttcgactataaactggaaccggaagtttacagtttccatttgttggatgcgctgattaaagaagctgagaaagaaggtatcaccaatttccccattcatgtgaaactggataccggcatgcaccggttgggatttgctccggaagatatgccccggctcatagaacgtctgaaaggacagaatgcggttattccccgttcggtattttctcattttgtaggaagcgacgctcagcagttcgatgcttttacgcgtaaacagatagaaacttttgaaaaggcttccatgcagttgcaggaggcgtttccgtataaaatacttcgtcatatctgtaattcggccggtatagagcgttttccgggagcacagtttgatatggtgcggttgggaatcggattgtatggcatcagtccgatagataattctataatgcataacgtcagtacgttaaagactaccatcctgcagattcgtgatgtgcccgaagaagatacggtgggatatagccgcaagggacatttgacgcgcccttcacgtattgctgccattcctatcggctatgccgacgggttgaaccgtcacttgggcaatggacacgcctattgcctggtgaacggacagcgtgctccttatgtgggcaatatctgtatggatgtttgtatgattgatgttactgacattgattgcaaagaaggcgacagcgttgagattttcggagatcatcttcctataaccgtcctttccgatgtgctcgggacaattccctacgaagtgcttacaagtgtttcgacacgtgtgaagagggtgtattatcaggattgagaagatgacaaggcgtaaagtatggaatatacttcatattttatactttatactttgtatttcgtgcttcgtacttcataaatcttcttatctttgcaatcaaatttaatccgatatgattatgacaaacttacttttattaggtttcttgcccagcggttccgagtggattatcatcgcattggttatcttgctgttgtttggcggtaagaaaattcctgaactgatgcgcggtttgggaaaaggcgtaaagagtttcaaagaaggggtaaacgaggctaaagacgaaatcaataaagcaaaggaagaggtggacaaacctgtagataataagtaataaggtgatgaagcggttgttgtcgtcccgttaccttgttgttttaccgccttgtcactctatcgctgtttatgtttatggcagataaagagttaaccttctgggatcatttggacgaactgcgccgggtgctgttccgcattcttggtgtatggtttgtgttggctgtgggttatttcattgcgatgccttatctgtttgataatgtagtgctggctccttgccataatgatttcatcttttatgatttgctgcgttatatcggtgaagtatttgacttgcatgacgaattctttacgcaggagttccagataaaattgataaatattaatctggccgcaccgtttttcatccatatatctacagcattttggatgtcggtggtgacggctgcgccatatgtattcttcgagatatggcggtttgtcagtcccgcactctatcccaacgagcgcaaaggggtacggaaagcgctcggtctgggtacggtgatgttttttgtaggagtgttgctgggttactttatggtatatccgctgaccttacgttttctatccacttaccagcttagtgcaacgatagagaaccagatttctctcaattcgtacatcgacaattttatgatgctggtactctgcatgggacttgcttttgaacttccgttggtgacgtggttgctttcgttgctggggttggtgcataagacattcctgcggaagtatcgtcgccatgcagtggtgatcattgttattgttgccgctgttataactcccactggcgacccgtttacactgaccgtcgttgccgttccgctctatcttctttatgaaatgagtatcctgatgattaaggacaagaaagcggatgaaaccgaggagattatagagaccggagagagatgaatgctgaaatagaggaatatttttatttactgcgggaagtctgtcgtgcagatgactcttctttgggaaccgcttaccgtcaattgcgggaactgcttgagcatttatgccgtacgcaaatgacggatagcagtctgcaaatgaccgaccttgccgcccgtatcaattttgtatcttccaagctggggctgaccgttgcagagcaaaatcgcctgcatactttccggcttgcctctaatgccgtccttaatcgccaggcagagccttcacgcgaaaaactgctgcgtgatgccaagacagtatctttctttgtgaaacgtataaccggtgaagatattccggcagacctgtatcgtctctttccgcaggctgatgccacgtacattgcacctctcccggcaaaggagcgtgtacggcgtatgcgcgtcaattttcagtatgccgatacggattatctgtatgtactgcctgtggatagcgtggcggacgaaccgttgcgggtacgttataatgtgcctcaaatcaatgatgaatttgctgagacttgtggcttgttgtggcggcatgcccagattaatctgctggatgtggcagtagatgaggcaggtgtgcttacaccctctttcattattttagaaccggattatctgcttgatatcagctcattggcagaatgtttcagggaatatggccatcatccggcaaactatatgctggcaaggttgcagatgcccgataatacccgtcctcttttgttgggtaatatagccaacctttttttggacgaatggattcatgcggaaagtgaacctgactatctggaatgtatgaagaaagcgttccgctcatatcccattgaactggctgcctgcgcagatttgcgcgaccgggagaaagaacgtgaattctttgccgactgtaaacggcattttgataatatccggcaaactgttacagatactttccgggcttcagggtatgaactggacaaaacggatgccgtgctggaaccgtcttatatatgtgaggcgttaggtctgcagggacgtttggattatatgcagcgtgatatgtcatctttcatcgaaatgaaatcgggtaaggcggatgaatatgctatccggggtaaggtagaacctaaagagaacaatagggtacagatgctgctgtatcaggcggtattggagtatgccatggggaaagaacatcatcgggtgaagccgtatttgctctatacacgctatccgttgctctatccggcacgtccttcgtgggcaatgctgcgccgggtaatggatgtccggaaccgtattgtagcgaatgaatacggcatccagttgcgcaatagtctgcaatatacggcggagcgtctgcgcgatattgctccgggaactctgaatgagcggcaactggataatacattgtggaaacgttatctgtatccttccatcgatgcggtgacacagaagattcatgcgttgtctccattggaacagtcgtatttctatgcgttgtacaattttataacaaaagaactctatacttcaaaatccggtgatgtggagtatgaaggacgcaccggcgcatctgctttatggcttgctactttagaggagaaaagcgagaacggagagattttatatgatttggcgatacggcaaaattgtgcggcggatattcataaaccttatttactgctggagcgtacacatacggatattgatactttgcccaatttccggcaaggagatgccattgttctgtatgagcggaatgtcagtgaagataacgttaccaataaaatggtgtttaaggggaacatcgaggaaatttccgattgcaatatccgtatcagactccgtgcggcacaacagaacgtcagggtcttgccaatggaaagccgctatgcaatagaacatgattatatggatacctcttttcgctgcatgtattggggattgtcggcctttttgtctgcaacgaaagaccgtcgggatttgttgctgaatcaacgtaaaccggaatttgatactgcccttaacggagctatatcggttgctgccgatgattttgtacgcattactttgaaggcgcaagctgctaaagactatttcttgctggtaggtccgccgggaaccggtaagacctctcgcgctctgcgcagcatggtagaggctttttatagggaagggaaagagatacttttgctttcatatactaaccgggcagtggacgagatatgtaagatgttgacagccattacaccggaggtcgacttcatacgtatcggcagtgaactttcctgtgacggcgtgtatcgtccgcatttgatagaaaacgtgttggagtcttgctctacacgccgggaggtgcaggagcgtatggcgcgttgccgaatttttgtgggaacggttgctacgctgtctgccaagaccgaattgttccgtttgaagacttttgatgtggccttgatagatgaggctacccagatattggagccgcaactgttgggattgctttgcatgcgcggcgttaccggcgggaatgctatagggaaatttgtcctgataggtgaccataaacaattgccggctgttgtactccagtcatcggagcaatcggaaattcaggatgaaggtttgcggggcatcggtttgcataacttgaaagattctctttttgaacgtctttatcggaatgccattgggcaacaggcggttgacggtcggcaaatctctgctttcaactcccggttttcagctttcaattctcttgatatgctttgtcgtcagggacgtatgaatgtagaagttgcagcttttccgaaccgtgctttctatggcgggttgttacagccggtaggattggaacatcagacaggggttcttaaactgtctcctcagctttctgctgatgaatttgccgctttgctgacccggcgggtagcttttcttccgtccgttcccgaaccgcctatgcagtcggcaaagatgaaccgttcggaagcaaaaatcgtagccggactggctgctgctgtctatcggcagtatacatttgccgagggacgcttcagcgcagcttctactttgggagtaataaccccttatcgtagtcagatagctttgataaagaaagaaatagaagctttgggaattccagccttgaatgaaatcctggtagatacggtggagcgttttcagggaagcgaacgcgatgtcatcatttactctttctgtgtgaacaggttgtctcagctgagatttcttgccaatctgacagaggagaacggaatacggatagaccgtaaactgaatgtagctttgaccagagcacgcaagcagatgtttataatcggagtccgccaattgttggagcagaatccaatctatgcgcaactgttgaaaagttgtgatttataaggtacgaaacgtttcctattgccgtagattgcagctatttcttcatttaataaatcttaaatattttctttctctttatatgctttattaataacatcgtgtgttataaagccttatctttgcagcacgtttttttcatagagatttagatttaaggttagaagaattgtggaagtcgtgagacttcccttttttttatcccttaattcttgttctctcagaatttaccgacaaatcttatattgccaagaggatataaaaaaaagctctttcatgcgaaagagcttttttatatctatatattctgtctgtatcagttcagtacgatgggtttgtatttcggtaccagaagcttcatgatgcaccagccgataaggtaagcaacggcacagatgcagaatatgatgaagtatccggctgccttgccttcgaatcccatgaatatcatctgggtttcatcagcgtaagtaaacagtgtacccgagcctttgttgatgaggaacgagccgataccgcccgccatacctcccaatccggtaatggtagctaccgcacttttggggaacatatcgcccactacggagtagatgttggcagaccaggattggtgagctgctccggcaatacctataatgataatcggataccaataggagtattctcctaacggttgtgcaaatagtgcgagtaacgggaacaaagcaaagatgaacatggctcgcatgcgggctgcatacggattcataccggttttgtttatgatgatggtaggcagttttccaccatagatagacagcatggtaatggcataaagtacgaatatcagcaactgtgccgttccgctgtccgaagagaatccgtagacatcggagatgtaggccggagtccaaaacaggaagaaccaccatacaccgtcagtcatgaatttaccgatggcaaaagcccatgcctgagggtattggagacattccataaacgacatctttctttcaggcttttcagagacagccttgtcttcttctctgagtttatcttgttcgatataagcaatttctgctgcattgacgcgcgggttttcatgaggtttcttatacatgaacatccacatgcccatccagacgaatcctaatccaccgatgacgatgaatgccatttcccaaccgttgcctacaccgatgctttggaagtaccgtgctaaagaggggatggtgacaggagctattaaagcacctactgtggcgccggcattgaaaatggaagtcgagaatgcacggtcttttttcggaaaatactcggcagtgactttaattgctgcggggaagtttccggcttcaccgacgctcaatatcacacgggcagcgatgaaaaagtaaacactggtaatggcaatggtcgatgctacggcacctgttgcggaaatcatggcagcggcgtcatgaatgcccactacatgttcggttgcccatccgcaaacagcatgcaggcaagctcctaatgaccatacgaagatagcccagagataaccttttttggttcctaaccaatcgatgaagcgtccggcaaataagtttgcaatggcatatactatggaaaatacggctgtgatatctccataatcggcatctgtccaatggaattccggggcgataaaatctttccaggtaagtgataatacttgtcggtcgagataattaactgttgtcgcgaagaataacatggcgcaaattgtccagcgatagttagacattttgcccaatgtgttctgatttgtactcatgataatagatttaatttataatgtcgcaaaaatacgcgttcttgtgttatgtgtatgtgtaatatttggtagaaatcatggagaaaatgacaaaaatgaaggtgtgtcaaaatgcacaccttcattattttacgtacaaagccccgactttcacaagctggggctttgttattacctaaagattctgtatctttaggcataagaatttcactatgacaaagatacattttcgtccttacattcccaaccaaaccgttctttttcctcaaagaattgatgaggatattgcagaaaacgatccggtgcgcatggttgacgccctggttgagggcttgaatcttgaaagtttcagaaagctgtataaggaatgcggccgcagcccttaccaccccaagatgatgctcaaggtcattctgtatgcctatatgaacaacatctactcctgccggaaaattgaaaagcttcttcaccgtgacatccattatatctggctggccggatatgagaaaccggatttcattaccatcaaccgtttccgcaaccgggtgaagaaggaaatcaacgaggtgtttacgcaaaccgtacttcttctctcttccaaaggcttcatcagcctgaatgtggaatacattgacgggacaaagatcgaatccaaagccaacaagtacactttcgtctggcgaaaaacggttgagcggaaccgtgaacgcctgatgaagaagatacatgtcctgttagggcagatagacgatgtcattgcccgggagaagtcatcagagaacaatgaggaggttgagttcactccggccatgctgactgaaatggcaggagaattgcgtcatgcattggaacaggtttccgagccatccgcgaaagaggaaaagactgaactgaaaaagaaacgcaaacagctgaaggaactggaagaacacagggacaaactgcaggaatacgactgccatctggaaacactgcaagagaggaattcctattccaagacggacaaggacgctacttttatgagaatgaaggaggatgccatgcgcaacggacagacgaagcccggttacaaccttcaaatcggcaccgaaaatcagttcatcaccgattttgcactcttcccgaaccctacggatacactgaccctgattcctttcctgcaatctttttcaaacaggtatgaccggatggcccatacggtggttgctgattccggctatggctccgaagagaattaccgcttcatgtccgaaaacggcatggaagcctacgtaaagtacaactatttccacatggagcagcggccgagattcaaaccggacccgttcaaggccgaaaacttctactacaatgaagaacatgacttctgcatctgtcctatggggcaaaggatgcggaggataggcaccaggaatgtgaaaaccgcatccggatatgtcagcgaaaatgcacggtacagagctgtcaggtgtgaaggctgtcccctgcgatgccgctgttttaaagcaaaaggaaacaggacgatagaactgaatcataggcttagacaatacaagcggagagccaaagaactgctctgctcagagaaaggactgaaacacagagggcagagatgcatagaaccggaagccgtgttcggacaaattaaaaacaatatgaactacaaacgtttccgacattttggaaaggacaaggtcttcatggactttgccttcctagccattgccttcaatataaaaaagatgtgtgcaaaactgacaaaagaaggtatgaactggctgataggatggttttatgagcttactgtcgctttatttagatgctggagacacataaatcaaagaaatcttcgaattatcgcagcttgaagaaaataaaccgatttatatcggtgataaacaagaaagaaggtgcatcgtgcattacgacacaccttcattttcttgtctacggatattatttcatatctgtgtatttgatttcatctttgtcgctgtacttcaggttctcacctcccataccccagatgaaagtatagttgctggtgcctgcagctgcgtggatgctccattcgggagaagtgatggcctgctcgttgtgtaaccaaatcaggcgttcttcttgaggctcacccattaagtggcagattgcatttcccggagccaggttgaagtagtaataggcttccatacgacgtgtgtgagtatgggcaggcatggtattccatacagaacccggagcaagctcggtaagtcccatctgcaattggtttgtaccgccgtttttcactctttccaaaacatcttttacaatcagctggtttacgatacggtcgttgctgtcttccatttttccgtaatggtcggaaatgcccaaagcatattttttaggattggccttttgaagtttggcatcggttgtaatcaactgagtaacgtaaggtttgtaagccggagccgagttgatatagaatttggcagggttggcagcatcgttgctcttgaaagttacttctttattgccacaacctacataaagagcttctttatacttcatggggtattctttaccgtctacggtaactactccatcgccaccggtgttgataacacccaactcgcgacgttcgaggaagtaagtgatttcaggacccaactcacggaaagtctccagtttcaatactttgtttacaggcattgcacctccgtaaatcaaacggtcatagagggtgtaagtaacattgatttcgtccggagccattactttgctcatcataaaagagctacggagacgttgtgtgtcataatgctttacgtccaatggatggcaggctgtctgcacagtgtaatttacttgggcggaagccgtaactgcggctgcacccaacatcagggcaattgctaattttttcatgtctgatataaactttaaatattaatatgcttaatgattgcttttttatttagcactctctttagcttctttttcactgcggacaatgatgcgacggttgatgaacatcatggttatcgctaccagtaccagcagtgcagcacctacatacgagagttttacacctctatatatagtccagccgaagaaagaagcggcaaagtcgatggaaccgccatcaaatccttcaggaatgtgtgccgtaggatcgtgtgtttcggcatatacctgattggctgccagcgtgaagtccggtgccatatcggttacgaaatacaaacctaaaataagagtgataagaccgataataagtgtcttcaatacattccctttagtaaagggcaatatcatcggaaacagatagaacatacctgcaagtgaggccaatggcaggaactgattacccggcaggaatacggcaagtgccaggataacgggaatcaggataaccgatgccaccaatgtagcggggtggccgataaccaatgccgggctcataccgatatgtactttcttaccgttgaatttagcttttaccagttccgaagtcttttcggagataggcttcaatccttcgataaacagagaagtgatgcgggggatgagttccattacggctcccattgtgatacccaggaagagaactttcttgatgtcgagttgggctgcccagcctatcagcatacctacgataactcccaataccagcggttcacctattacaccgaactttttcttcatgccttctgcatcgatttccagcttggagaaaccgggaattttatctaatgccttattgataagtatggcaaacggtgtgaaactctggcagaaaggctggggaatagagataccgtccaaatcatagaacttttggaatttttctgcagtaaggtctgcgcagaccaatgtaataatgtagcagatgatagcggcgaaatagccccatgccagattctggccggtaacaaaataagccacagcaccgatgaaggcgaagtgccaatagttccacaagtctatgtttacagtacgtgtggtcttggtgataagcatcaggaaattgacgcctaagcagataggaatgataagcgcaccaacagcggtattataagctacggcagcggcggcaggccatcccatatcgaatacgttcagttgcaggtgatacaaatcggatatggctttcagaggagaattaaaatttgttgtcagcagggcggtaactacgcctaagcccacaaaaccgactccgacaaagagacctgatttcagagccttgccaaatttcataccgatgcacatgcctatgattgtaaaaataataggcatcattacagacgctcccaaagcgatgatgtaaccgaaaacttgttccattctttatgtgatttaattgataaatgattatgttttacaatagtacgaattgaaaatcggggtcaaaaataagaccttttcctaattaatcaaactgtaaaggcataataaatagtaaataaggatgattttggacaaatttgtcgttatcgtgcacaaatttgttcgtttccgtacacgaaaatcaaaaaatgcaccctctgcgccaaaaagtgcacaggtgtttggaaagaaacatctacttttgtttcgtgaaaaattataaggtctaatacccaaaaagaacaactacatgaaaaagaactttatttgtaattttattctatccggtttattgttgctttctcctttaagcatgtttgcacagcgtgtggattcaaacttgccgtggtcggtacgtatggtggagtccgaaatgattcgttgtccggaatcctggcagttggactttcagcctaaattgaaatgggattactgtcacgggctggaattgcaatccatgctggatgtgtatgaccgctacggtaatcggaaaatctatgattatgctttggcttatgccgatacaatggtaaatgcagatggtactatcaaaatgtacaaacgtgaggagtatagccttgaccgtataaactccggtaaatttatattccgcatctatgaacagacgaaagatgagaaatataagaaagcgcttgcattgatgagaagtcagctcgatgagcatccccggaatgctgacggcggcttttggcataagaagatttatccgaatcaggtatggctggatggtatttatatgggagcgcctttctatgcggaatatgctttccgtaacaatcaggtagacgattatgcggatgttatcaatcaattcctgatggcggcccgtcatacttacgacccgaaaaatgatgtgtaccgtcatgcttgtgacgtaagccgtaaagaacgttgggccgatcctgttaccggacaatcaaagcatagctggggacgcgctatgggctggtatgccatggcctttgtagatgctttggatttcattccgaaacatgaagcgggccgtgattccatgttggttatctttaataaaatagcttctcagataaagcgtttgcaagattccaagaccggtttgtggtatcaagtgttggacaagagtggagcgccgggtaattatctggaatcttcctgttctactatgtttgtatattctctgttcaagggtgtgcgtaaagggtacattgacaaatcctatctggaagtggcagttaaaggatataagggcatccttgacaactttatagaagtggataagaatggtgtggtaagcatcacaaaggcttgtgccgtagcaggacttggcggaaaggtctatcgttcgggagattatgattattatatcaatgaaactatccgcaacaatgaccccaaagctgtaggtccgtttattcttgcatcattggagtgggaacgtcttcaggacgtgaaagtgattgttaaccggaaatgatagcgaaagtaactatgaaagcactgtgtagttttataataaccctgctttgcggggtcggttcgttatccgcggcgcagcagtggaaagatacgattgttgtagcccgtgacggcacgggagattaccgtacgctgaccgaagcaatggagggtatccgcgcctttatggattataaggtgacagttttggttaaaaagggtgtatataaggaaaaggttattcttccttcttggttggaaaacgtcgatttcatcggtgaaaatgtagaaaatacgattatcacctacgatgatcatgccaatataaaaaagatgggaactttccgtacctatactttgaaagtggaaggaagttccatcacttttaagaacttgacgatagagaataatgctgcacggctggggcaggcagttgcgcttcatacggaaggtgaccgcttggtctttatcaattgtcgctttttgggcaatcaggatactatttacaccggtgcaaaaggtactcgtctctgcttcctgaattgttatattgaaggtactaccgattttattttcggtccttctacggcattgttccataattgcacgattcatagtaaagccaattcgtacatcacggcagcttccactccgaaagacattgaagtgggatatgtttttaagaactgtaagctgactgccgcaccggacgttgataaggtttatttggggcgtccgtggcgtccctatgcagctacagtgttcattaactgcgagatgggtaaacatatctgtccggcaggatgggataattggcgtaatccggagaatgaaaaaacagcccgttatgctgaatatggtaatacgggagagggggctgataatacaaatcgggtaaaatgggtaaagcaactgacccggaaggatgttgcaaaatatgaggaaccggattatcttttcaagatatgcagtgaatggaaaccgtaagataaacttacggtttcagaaaatccgctctcataggactgaagcagtcgattaatataccggcttccagacaagtgcatccatgttcggcatccggttcgatataaacaccgtcgccagccgatacgatttgtttttcaccgttaaccgtgaattcaaatttaccgcttgccacataagttgtttgagtatgataatgggtatgcggtgtacctactgcaccttgttcaaatttaaccttgacgagcattacctgaccgtcgtaccccaaaatctgacgaacaacgccctctccggcgggttcccatgctttctcgttttcgagaataaacgcattgcttcttgttcttttcattgtgtgaatgataattttactgatacaaatatagcgataaataataagtttgaaaaaccatgaaaagtaaattgattctgctgttggcagcttttttcttgtgttccgctttcaaggccgataagccggtaattaccatttttatgattggtgattctacgatgtcaaataagtcgttggtgggcggtaatcccgaaagagggtgggggcatgtcctgcccggtttcttttctgaagacatacgggtggataatcatgccatgaacggacgcagttccaagagttttatcgatgaggggcgctgggacaaagtgctttcactgataaagaaaggcgattatgtttttattcagttcgggcacaacgacgaaaagcccaaagccgaccgccatacagacccgggaacaacctttgatgccaacctgcgtaagtttgttaatgagactcgtgcgaaaggcggtattcctgttctgttcaactccattgtgcgccgtaactttggtacggccgataataaagccgtagcggaagctattcttcaggatgatattcgcaagggaatcaatcctgatgccaagcaagacgcctctcaggaaaagaatgtggtggaaggagacaaactgattgatacgcacggagcatatctggattctccgcgcaatgtagcaaaggagttgaatgttccttttattgatatgaacaaactcacccacgatttggtagaaggcttgggaccgaaagaatcgaagaaactctttatgtgggtgcccgccaacacaattgctgccatgcctaaaggtcgtgaagacaatactcacctcaatatatacggtgcacgtgtcatagccggtattacagtagatgccattgccaaagaagtgccggaattggcaaaatatgtccgccattatgatttcgtggtagctcaggatggcagtggcgatttctttactgtacaggaagctattaatgccgtacccgatttccgtaaaaatgtacgcaccacgatattggtgcgtaaaggcgtatataaagaaaaactgattgtgcccgaaagtaagattaatatctctttgataggacaggaaggagctgtcatatcctatgacgactatgccaataaacagaatctctttggagagaacaaaggtacgtccggttcatcttcctgttatatctatgcgcccgatttttatgtggagaatatcacgttcgagaatacatccggtccggtagggcaggcggttgcctgttttgtcagtgccgaccgtgcttatttcaagaactgccgttttctcggatttcaagatacactctatacgtatgggaagggagtgcggcagtattatgaagattgttatatagagggtacggtcgattttatattcggttggtctacggcggtattcaaccgttgccatattcatagtaaacgtgacgggtatgtcacggctccttctaccgatgaaggacagaaatacggctatgtattttatgactgcaaattaacagcggatgccaacgtgaagaatgtttatttgtcccgtccgtggcgtccttttgctcaggctgtgttcattcattgcgatttaggaaagcatattcttccggtcggttggcataactggaataagaaagatgctgagaaaaccgttttctatgcagagtatgacagctatggcccgggtgctaatcctaaagcacgcgctgctttctcccatcagttgaaagatacggaaggatatgaaatagagtccgttcttgccggtactgacggttggaatccgattgctaacggcaatgcattggtaaacattaaacgttgattgataaaacaattctgacatggtaaagaataaaacaatattgggtgttcttactctgctattgggtttggcattgactgccagtgcggaaaattatccttacaggagcgatgtactttgggttaccgtacccaatcatgccgattggctctatcagacaggggagaaagctaccgtagaagtacaattctataagtacggcatcccgcaggatggtgtaactgtctgttatgaacttggagatgacatgatgccttcggatacgaaaggctctgttacgttgaagaatggtagagccgttgttactatcggcacaatgaagcaacccggattccgggattgccgtttacaggctactatcgctggaaaaacttataaacatcatgtaaaggtaggtttctcacccgataaacttcaaccttatacgaagatgcctgccgatttcgatgaattctgggataagagtaagtctgaaattgcaactttccctttgttgtatacgaaagagcgggttgaaaagtattctaccgacaagatagactgttacttggttaaactacagttgaacaatcggggacaaagtatttacggctatttaacctgtccccggaatatgcagaaaggtgcttgtccagtagtactttgcccgccgggtgcaggaatcaaaaccatcaaagcccctcttcgtcataaatactatgcagagcagggatgtatccgttttgagatggagatacatggactcaatccggagatgtccgaagcggagttcaaggaaatcagtaatgcgttcaacggcagagagaacgggtatttatcaaacggactggataataaggataattattacatgagacgcgtttatctggcatgtgtccgcagtattgactttctaacttctttacccgaatgggacggtaagaatgtcattgtgcaagggggtagccagggaggtgctttggcattgattaccgccggactggatacacgggtaactgcgtgtgtagccaatcatccggctttaagcgatatggcaggctataaggctggcagagcgggaggttatccgcatttcttccgtgtagcaggtatggatactgccgataagctgaatacaatggcttattatgatgtagtaaactttgcccgccggataaaaattcctacttacatgacttggggatacaatgatgatacttgtccgcccactaccagttatatcgtatataatgtgttgaattgcccaaaagaagcgctaatcactcctattaacgaacactggacatctgaagctacggagtatgggcatttactttggataaaaagacacctgaaatagcgattggccgttaacggtcagtgattgttattaataaggttatcactgaccgttaatctttatttctcatttctttgttaaagaactccaatacctcttcctgcatctctttgttaaagaaatgcttctcatcccatattttagtcacaagcctgtcaccggcatgttgactgttccataccgttcgcatcgtttgatacgcatctcttactccttctatcgggaataacttatctttgcttccattgaagaaaagggcgggtttaggacatgcgatacttgctgtatgcggataatccagataacgccttaagtttggaataagcatggagtaagcggaaccgcccttattctgattattagtcagcgtcatcagatgctctgtggtattcatccagcagatggaagcggatgcttttatacaatcagtcagcgcagccagcatccaggaacggtaggctcccatcgagaatcccaaacaaccgaccctgtttttatctaccattggcagtgaagccagaaactcggcactacgcacatcatccatgttgataaaagccccccaggatgcccccatttgcatgaaattggaagccagtgcctgctgtccgtcataacttactccttcctttcgtccgcgttctccccaaaacagggcgtcgatagacagtactacgtaaccgttttgtgcaaagtaatctccggtatattgtccgtcataacaacggaccacccaatcttcggcatcagccgatatttccggagagactccgaaaggacgtaccattttctctttgccgatggaaaagtgtgctccatgatcgtgcagcattatcacagccggaaaaggcccctttccgtcaggaaccaataaataagccggtatgcgggaccattccgaaacattaaaccatatcttgcgggcttcatatcccgcccgctgctctgttccgacgacagacatatcgtatttcgagggagcaggtggcagattctgcatgcactccatcactatatttcgtgtttcgattctccatttcccaaagtcttttgtggtagactttccccatgctgcgggataggtaagttgctgtttcagttgctcgtagaaaacgggcatgttctttgtcacttcataacttaccgtatcaacttgttgagcctttatacccagacttacggtaaggaaaacagcataaagtataacgcttggtttcatagtggtatttaaaataatgacaaatatacgatattttcggcgaaatgcgtatctttaccccacagaacgaatatgttatgagaaaacttctatatctggtcataggcttattgtttgtatttgcgttaccgtccggagcacagccggagtgtgtctttacccattattcgtccgaagagggactttcgcagaatactgtcatgaatattctgcaagacagaaagggaaatatgtggtttgccacttgggatggcatcaataaattcgatgggtatgatttcaggacttataaggcaaagtttgataaccgcattaacctgacaaacaaccgggtggactatatgtacgaagaccggtacggctttctgtggctgctcacttacgacaatcaggcttggcgttttaatccccgtaccgaagtatttgaacatgttcctgccatgaaagaagaaggaagcaggtttgtggtaacttcaatcaaggtattgccttgcggttcggtctggttgctttcggaggaagaaggggctatccgcatcaagaccgatccggagagttttcgcctttcgccagagatgtattcagttgataacggtttgttcccggccgcacgcgtatatgatgtttatgaggatgcttccggaaatgagtggatgctgactgacaacgggctggggatgcttgctgccggaagtggtgcccttacgtcctttttcgtagagaaaacattgaagaaagagaaaggcggccaaattttttatacagcccaggaatgtggaaatgaaatctttttcgggtcggatagcggacgcgtatggcgttatcagaagaaaaacggccggtttctgttattgcagttgccttgtgcctcacatatcgtggctgtaggaaagattgacgaacataatctgataatggttacagagacagacggattttttacttacaatacgcccgctaagacaactgttcattatccggcttcccgtctgccgggtgctcctgttcactccatttatatagacagaaactcggaagtatggttcgggcaggatattgcgggaaccgttgcacattttaatgcaaggacaaaagtgctgaaaacggaagtaatcccggtagagcctacatctaccgaccgttcccgtccggcttttcacgtgcacgaagatattttcggttctgtttgggtgcatccctatggcggaggtttttcgcgtttcgataaggctgctaattgcctgcgtcccttctataacggcttttcggataccgactggcgtttttccaataaaatccattctgctttttccgacaggcaaggcaatctgtggatgtgcacccattccaagggactggagaaaatcactttccgctcttcctttttcagtatgatgacgccggaacctcatcggtatgaatcattgagcaatgaggtgcgtgctctttgcgaagacacggagcataatctttgggtgggactgaaagacggcaaaataaggatttacgataagaatcgcacggaactgggatacttcacggagacaggtacgatatcacatgcggggataccgttaaagggaaatacttattgcatatttcaagacagtaagcacaacatttggattgccaccaagggtgagggattggtaaaagcccggcctcagggtggaggacattataaactgacccgctattgccatagtagggatgatatctacagcctgagtgacaacaatgtatattgtgtttatgaggacgtgaaaggccgtatctgggttgccacttttggaggaggaatcaactacctcacccataaccgtggcggacgggagatatttgttaaccaccgtaacaacctgaaaggtttccctatagataattgccataaagtacgcttcgttacaggtgaccatcgcggaaatatatggattgccactacagtcggcgcattaatggtaaacagtgattttaagaagcccgaagatgcagtgtttcatcactatgtacgtgtgcagaacgatgtaaacagcttgagtaataacgatgtgcactatattctgtctacccggaagaacgaactttatctggttactttcggcggcgggctgaataagttgcagactatagatgctgccggcaacgcaatattcaagtcgtatggcgtggccgagggattgccttcggatatattgctctccatacgtgaggataacaggggtaatctttggatgagtacggagaatggcatcagcaaatttattccagaagaagaacgttttgaaaactatgcagacggtcatgtctcgcctcatgtccgcttcagcgaagcggcatcggcctatacttcgtggggagacttgctgtttggtacgagcaacggcgtcttgctgttcaatcccgattctatcaggaagagcacatatgtaccgccgttagtgttttccaaattgcttatagccaatgaagacgttgtgccggatgaaaaaaatatattgaaagagagtttggatgatacccgtgaattgcaactctcgcacgaggaaaatattttcacgattcgttttgccgcacttgactatacggaacctgccggaatacagtatgcctatattctggagggatttgagaaatcttggaactatgtcggcaagcagcgtaccgccacctataccaacctgcccaaagggcattatgtgtttaaggtacgtgccaccaatgccgatggagtatggacggataacatgcgcttgcttgatattgaagtgcttccttccttttgggaaactccttttgcctatttcctgtatgtcctgtttgttctgttgattataataacggctgtttatatcttgtttacgatttatcgtctgaagcacgaagttgttgtggaacagcatatgacagatatgaaattacgtttctttacagatatttcccatgaactgcgtactcctttaaccctgatttcaggtccggtggaatacgtgctggagcatacgcaactgccggcggatgcccgtgaacagttacaggttgtggagcgcaacacaaatcgtatgttgcgtctcatcaatcagatactcgacttccgtaagattcagaacaaaaaaatgaagatgcaggtgcagcgtgtcaatgtagtggcctttacccgcaagataatggagaatttcgattcagtggccgaggagcatcacattgactttttgttcgaaacggaaaagcccgaactttatctgtgggtggatgtcgataaatatgaaaagattattttcaacttgctctccaatgctttcaaatatactccgaatggaaaaatgataaaggtttttatccatgaggacgaggaaaccgtttctattggcgtgcaggaccagggtatcggtattgccgagaacaagaagaaatctatttttgtccgttttgagaatctggtagaccgtaatttgttcaatccaagcaccggcatcggtttgtcattggtaaaagaactggtggagatgcacaaagctttgattacggtagatagtaagttgggagaaggcagttgcttcaagattgactttatgaaaggcaaggagcagtatgacgaatcggtggaatttatgcaggacgatataacagttggtctggaggcttatcaccggcaaacggcggatacggaagacgcgcagccctcacaaccggaaacgggttctcaggaaaaaggcggtggagatgcatccaaagatttgatgctgctggtagaagataactccgaactgcgtattttcctgcgcagcatcttcgcttccgagtatcgcattgtagaggctgccaatggtatggaggggctgaataaggcgttgaagtttctgccggatattattatcagcgacgtgatgatgccggaaaaagacggtatcgccatgacccgtgaattgcgtgctgatatgactaccagccatattcccattgtgttgcttacggcgaagtcgtccatcgaaagtaagttggaaggattggagtacggtgctgatgattatataaccaaacctttcagcgccacctatttaaaagcacgtgtaaagaacttgcttgcccagcggcagaaactgcaaactttgtaccgccagaacttgatgcaggcaggagcggttgcagctgttgccgatgaacagagtatcggtaatgtccaggataatcctcaaacggataaatctgcggcaatgtctcccaacgaccgtaagtttatggataaacttatagaactgatggagaagaacatggataacggtgacttggtagtagatgattttgtgcaggaacttgccgtgagccgttccgtattcttcaagaagttgaaaaccttgaccggactggcgcctatcgagttcattaaggaaatgcgtatcaaccgtgcagctcagttgatagccaccggtgagtattccatgacgcaaatatcctatatggtgggtatcaatgaccctcgttatttcagtaagtgtttcaagcagaaaaagggaatgacacccacggagtatcgggataaagtgctgaaataaaccattattcgtgttcagaatgaacataaactattggagtcttgttgtatttgaattatttgaaaactaaacaaagtctatgattatatatttgatatgcttgctggttattggcttgataatagtctggaatataaaaaaggctccttcggataaggatttgtggggagaggaagaacaagaaaaataaatataaatataaataagaggtgatagcctcttatttatatttatgaagtgtgtttatataagtatttttagctcattggaactctttaacgctcaaattgttttttccactccttgtacatttttaaagcttctaccggccaataaccgtaccagtcatatccggttcttctttcagcgtttacgtcagacagtttccataccttttcaccggagcgtttggccataaacggtctgttgtcagacagttcataaaagcggctccagatagcgggagcggtttcatctttaaccactacattgtcgtaaggatattcatggtttatgatatcttttccctgcaatggaacacgttcaattcgaataccttctattttagagttattgaaccatgctatagctgcttctacagcctgaataacctcttctgatggattctttattcccataagaaagatggtaattgcagtactttcccatgctgttaatcctggtaattcaaaagttctggcttttacgggaaccagagtttcgttatcatactgttgtgcccatgccgttttaatgccattctgcacatattgtgtcttcagtactacggcaagccctttatcgtatgacttctgtattgctttaagcatatcggagtccagccataaaaagctggagtctccttgcagtatgtttctgaatagttccaaagtaccggtggtaacatcatcgttaaaggtaacagcatctacatcccagcctctccagccgccattgttcttttgtgtggagagcagatattgcaggcctttttccgaagcggctctgtatttttgtttttttgttaatgtgtacacatccgccagatactctatttgcgagaatgtattccgattatcaagcgtactccgcttttgctcgtctttcagaccagcttttatggaatctatgttcagtacacctgcccaatccatgtttttcagccagccgccgtcttcattttgatatgcaatcaggttgtcggcaatcttctcgtaatccttttcggcataacgcgcatacgtacggtccggatgcaacaagttccaatggtgtattccatccagcaaagcatctaaagaaggtactttctgtgcaaatacagcagcaggaaataaaatacctatcaggaatatctttaatttcatcatagtgcaatttattaaaatccgggattctgttctacggtttctttattacggttgatggcatccaatgggatggggcggagtattttgtaattaccgtcattacctacaaagtcattaaccttaatgttatcgtgattgtaagcgaaacatgcctgtccgtcataagtgccattggcaacatatcgaattaagcgtccggtacgtttcaagtccatccagcggtggtattctcctgccaactcacgtgcacgttcgtccaaaataaagtcgataccttgttctccggtcaaatcactttcttgtaccgaaaggtcatatccggcttctgtagcacgttcgcgcaattcattaatcttaatttttgccttgtcgggttgatccagttttacataagcttctgcggccactagataggtttctcccagacgtgctaagatgatgtcgtgcgtgctgccagtcatggagaatgcagaagtggggtcatcgaactttcttatacaagctactccgtaatcatctgtacacttatcggcatatgctgtcatatttccttttctgtcctcactcatttcggtcattttgataactgttgcattttggcgcaaagtcggattttctcttttccaagcttcaatgtctgtatcagacatccagccgggagcatagaaatacttaataggagaagtggttggagccgtgtagtaatcatagtaaaacttatgcaactccagcatgaatgtaccttcatagcgcttgtcgcctttcgtaaacaaattgtgcagatgaacagtcggagcaagataaccggcgttgtacttgttcttttcttcggcaccgcctaagtatactccgaataccgattgttgcatattgccgtctttgctcaagtcttccaaagtagcgctgctgtactgtacggaccagaaaatttcatcgttttcttcgttgttaatgctgaatacgtcattgaaagcgatggtcggtttttctccgtttatggctttctcggcacacaaggctgcattggtgaagtcattgctgtcggcaaatgtttcatagcctcttgccagataagttttggcaagaaaatgcatagcagcacgtttattggcacgtccaaagttatctccggtagcttctgaacgctccaacagttgtgagtcgtcggatgccaggtaagagaattcatctataacgaactgataaacgttttcagcactctcacgcgcatggttcattactgcagattcaaacatcgttttgtttaatgctactccaccgaagtgttgtaccagtaagtagtaatagtaagctctcaaaaagcgtgcttcatctacatattgcagttttacagaagaatcttctgttgattcaccgtaatatataacagaattggctaattgtattcctttatagcattctgtataaaactcttgcacgtctttgtcggaagagttataagatgaaccgtatagcccaatggcgtctacgccttgtttaccacctgcaaacaagtctgttcctgcactgaatacccagggagctccgccgtaaatacttcttagagaagaatatgtactgttcagcaaactgttgaaaccgattttggtattatagaattcatttgagggaacatccgatctgttgtcttgttccaaaaagtctgagcaactgctaatggtaagtcctaacaggcaggttgcgatatatattgcttttttcatggttatcaggtattaaaattttaaattaactccaacttggtatgtacgtgagctcggtccgcctgttccgtcattcaaggctgcctccgcccattccggatcaaagcctttatagcttgtaaaggtgaacggattcaatacattgacatacaaacgcaagtggtctacaccaatcttggacatccagcttttggggaatgtgtaacccaaagtgatgtttttgattttaacgaaagagttgtttacgtaagagttgcctacataagttgtctgtttgtcggtaccccaaccgataccgccgccatagttgttgttggccgtgttggtaggataaggatatgcgcccatgtgagcttctgttgttagggtataaccgcttccatcggcattgagcacaggagtacctgcggggatataataatccattttcagcttgttacgtccgcggtctttgtagttggtgaattcggccatgaacggactctctaccataccgccttgtttggtatagatggagaaagagaagtcgaagttcttgtaggtcatgtttgaagtaacactacctgtccatttcggtaatgcatggcctaaaacaaccaaatcgttttcgtcaataaccccgtaaccctcttcaccgggttgctgctggtctttcagtttcatttcaccttcgatgaatttagtcttgatagcatcgtttgtggcataagcttttgcttcttcggcagtacaaactccggcgtattcatagtcgtagataacgtcgataggctggccgatgaaccatttattggctattaagtcttctttgccgccattcaattccagtatctcgtttttgtttttggcaaaggagaaagtagtgctccaatagaagttcttagtctgtacgttcacagtgcttaatgagatttcgacacctgtattcttaactttacctacattattcatcatggctcctgttgaagaacccagctccagcggtgtcaattgttccattagcaagtctcttgaaactttgttgtaccagtcgatgctaccgctgatgcgattgttgagaaatccaaagtccagaccgacattgatttctcttgtcttttcccatgtcaacaaggtgttggtaataccgttgataccatatccataggccggtgcaccaccataattataccaatatttggtacctgccaatgattgtgtgtcataaggtcccacattggcgttattaccggtcagaccgatactagctcttaacttcaagttgctgatccatgagagttctttcgcaaagtcttcttcgctgatacgccatgctaatgccatggatgggaaagctccccaacggttatctttctggaatttggagcttccgtcccaacggctggatacggttgccaaataacgtcctttataagcataattcagtcgcagtacatatgagagcatggttaacttttcatagtagctgttcgcattgctcaggaagccggcagaaccggtattataccagtctacatcgaacggcatatcgttggcagtgatggcatctccttctttggttgcgctgtatacgctgaacaatgccaatgcgttgatgctgtggtcgccgaatgtcttgatataattggcttgcgtatcccaggtgtatgtgaaataatcaacgttggtgatagtggccgtgttgtatggatcaccggtgctcggattcttggaagagaactggctgtctgtattcacaccatagaattcgcctcgtttgctgcggttgtatgtaggagagaatgtggtcttcaaaatgacttccttgataggagaatactgcaagtataagttacccataacatcgtaactgcgtgtttcatctgtagagtttgctctatctaccaatgggttcaatgtagaagtgaaaccgccgccatcgggaaatattgctgcatctttggcaggttggagtattaattctcctttattttcgccttcccaatagtaaggaacccagtagggatttgcacggaaaccggtaataaccgaattcttgctgccatagtctttcagagaggtagaaaggttaactaacgcaccgatagagaaacggtcattgattttgtggtctattgcggccttgacattccagcgttcataggagtcgtacaggatgccgtcgtctttctgatagcccaaaccaacgcggtaagaaagattctttgtgttaccggcgatgttgagataatgattttgttgctggccatctgtagttatcaaatccggccagtcataatatccttttgttgcataaatatctttgattttggcgctgttattgccccaaaaagcactccaatccgtatctttcatctgataagtaggatgtccgaactcgtccgtagacttcagggttgtataacgttggaaacgatagttggtccattcgtcgccactcataaattccggcatattggctacggttttgtaaccgtaatatccgtcgtaagtaacttgaactttagcttcgtctttaatgctcgttcctgcttgcttagttgtaatcatcacaacgccgtttgttgcgcgtgagccatagatagcggtagaggaagcatctttcaagatgtcgattttttctatatcggcaggattcaggaagttcatgttgtcgcaaaccactccgtcgataacgtacagaggttcgccaccggccatagaactcttaccgcggatagcgatgttaaatccttcaccggcgcggcttgaactttgagaaatgtccacaccggcaaccgaaccttgcaaggattccataactgaagtggtacctttagccataatcttatcgctgtttacacttccaaccgaaccggttacatccgactttttctgtacaccgtaacctaccaccaccacttcatccaatgcctgcgcatcttctttcagtgttaccttaatgttcttttggctgcccactgtaacggtttgcgtgatataaccgataaatgatacctggatttttgcattgggctgtacgctgagtttgaaattaccgtcaatatcggtaattacaccgttggtcgtacctacttccaatacgtttgcaccgataataggttcacctgtaccgtcgattacggtacctgaaatttggtgaccttgtgcaaaggcgattaagcatagcatactcaacgacagagtagccaatgctctttttgcaagtctttttagattcataagtttgttttttatagttattaaatgtagtaaggctgataatcgtaatgaggtattctcacccgttatcgaacacaaaaatacatgatatatcgtaaattttatagtattttttgatattctttgtggaaaaattaactgttatcctctgactgtccgtgtggcatattctcctttctcccttcacatctccctattcatcaggctttgcgggtgaacccttggttgggaggaccataacagataagcacttcatttttttatgtcagagacactaccggatagaaatttccatagcgtccgtgctttcgcagaaaaccggcgggcacgagctgctgcggaaaactgttcgggttgcttcccctcatggcggcagggttttgctttttcagttctttgaagatgtcggcagcggagagatttcttattttttcttttgggtcctcggatgttgcaggacggaaacaactgcgtagtacttcttctgccggattgcggtgctggaagatgaggttgtgctcttggagctcttcctcttcttcggccgaaaaccaatagcgtgctccgtccgaaagttcctgtttcagttgtgcatagatttgcttgtgctcaatgcaggtacaatcaattttatcctttacctctacacagagaaaacggcggctgccggtgttgtcggacaataagtcgaaacggttgctcgtgccgatgaaagaagcgatacggggcaggttacggaaattcttttggtatgccttgcaaaggtttaaatccgccatttgcatcaggtttttgagcagcggtatttttcctggagaatatttatcgaattcatcgaggttcagcagtcccatttccgacattttgcgggtggcattgctccgtgaggtaagctccacttcatccgaatagtagcgggacaggctgtcgggcatcagacttttgcagaatgtggatttcaggcagccctgtctgatgctgacgagtaggggagccacgctgttggcatgctttccggtctgtcctgtccattgggcagtgagaccgagcatccatgtatggaaaccgtttatccaatatgattcggacgagatgcgttgggccagtcgggttatccggtcgatgccatcccaaacgggaagctgttcaaaataaagcaggaagggatgatattcaggtacatgtttggagaaaagaaaacggctgatatctttgtcccaacatagaattccccgggcatgggcttcgaggcatagggtattcagttcccgtttgccgatggtgacaaacgttttgtctgcggcattggcggggcggtattcggtttcgtctgtcagcaggttgtaacggaagaggtaactgttttgcaaaaagcggtttacctgttctgtcaagttacatttttgcacgcgggcaggtttgtcatgcttccggtttcttagtagaaagaggataaatttcataatgctttttttcatggtatgcattgtttttattaatgggttcatgccactaagttactatcggcaggaagccttttgcaagcctttcttatactatttttattggtggtacagtatgtggaaagaccttgtgttattgtattttcaatgtgagataattctttttctctcgttgtaaaataggatgttgactatagtcaaccgttctgttcattgctgtcggctgttctgtttacaacagtcggctgctttgttgactgttgtcggtaaccggtttatcttaaaggaaaaatagattatctcgtaggaaaacactatatttacacaatataaataaatactgcacaatggcaattcattttgaatggtatgagaatccggttccaccaaaccggccggatgagaaaaaactccatgcacgcattacgtacaatggaaaggtagggacagactacgtgaggcgtaaaatccaggagcgttgttcgctgacggaaacggatgtaacggctgtgctcgatgcactgtcgcatgtgttggggcaggaactgggcgacggacgccaagtgcatctggacgggataggttattttcatcctacgctgaaatgtatagaagaggtgacggcagagacgaaacgcaaaaataccaaagttcgcttaaaaggtatcaagtttcgtgccgaccaggcattgaagaacgaagtaggagctgtaaagcttaaaaatatcaagcatgacggacactccagtaagttatcggacgtggaaatagacatgcgtctccgtgcttattttgccgaccatcagctgatgacccgtgcagacttccaacagatttgcggatttatgaggtcgaaggctatggaacatatccgcagattgaagttggaaggaaaaatacggaatataggactgcctacacagccgatatatgtacccgtggagggatattacgggataagcagggataggattgtcaggaaatgattttttgacttttattatggatttgcgggtgaaggcttggaaagaggcttcacccgcaaatgctgatggatagggagatgtgaagggtaaagaaataaatgacagatggatataagcatatatccttatgatgttttttagcaggtaaaacaatttttagcagttttatgtcaaaatctacacaagagatgtgacttaaaaaatgaattttgccccgtgaacaaatatcgtggagaacattatttttttaacacatctttttatgtataatcaacaaagactaaagaaagttgctttgatgctcatgatgagcatgctttgcctgatttcctttgcacaggaaagacaggtgcagggcatcgtgaaagacaagagcggtgaaccgatgattggtgtcaacgttttggtaaaaggtaccaccaacggtaccataactggagtggacggagattttacgctttcgggcgtgaaaaagtccgatatcctctcttttacctatatcggctttaagaataaagagctgaagtatgaaggagaaaaactgctgaatgtggttttggaagaggattccgagttattggatgaagttgttgtcattggttacggtacggtgaataagcgagacctgaccggttccgtagcttccgtcagttcgcaggatattgcatctattccggtatctagcgcttccgaagcattgaccggtaaaatggcgggggtgaatatcactactacggagggttctcccgatgcggatattaagatacgtatacgtggtggtggttctttgtcgcaagacaattcacctctttatatagtagacggttttcctgtatccagtatcagtgacattgctccgtctgaaattcagagtattgatgtcttgaaagatgcttcttctacagctatttacggtgcacgtggtgctaatggtgtaattatcgttactaccaagagtggtaaagaaggaaaggttcaagtggattttggcgcttcgttcggttttaagaaagtgactaaaatgactgaagtgatgagtccttatgattttgtggcttatcaacgtgaaatcggttcgttggattacggaaattataatgatatggatatctggaaatcaatcgatggtattgactatcaggatgagatattcggacgaacaggtaatcagcagcaatataatgtgaatgtggccgggggtagcaaacaattgacctacagtgtaagttatgctcataatgaagaaaaaagcattatgcttggctcaggttttaagaaagataatatcaatgcaaagcttaagtcggaactgaacaaatggctgactttagacttcaatgcgcgtttgagttattctactatcgagggtttgagtggtggtgctgatacgaatgagtccaatgctgctaattctactgtagccaatgcggtggttttccgtccggtcaatgctttgtctcatagttcggatgatgatgaggagagcaatgctgctttacagaaaacgcctttggaacgtttgctggcaacgaataaaggacgcaattctttccgtcagaattataatttcggtttgaattggaagccgtttaagaactggactttccgctcggaatttggttatggttggagatatgaagatacagaacaatattggggtactgacgctgtaagtaactctaaatatggttataacggacgtcctcaggcatatttgctgcgtgagacgacaaagaactggcgcaatgccaatactcttacttacgaaaataagaaaatgtttgatggtcgtgaccgtttgaatgtgctcgtgggacatgaagtgagcagcagcatggaggaatccatagagaatgtgtctgtaaatttccctacaacaatgggatttgaggatatgaaagccaatatgggggccggcacggcattgccgaaccagtctactatctctgccgaagagaacatgctttcattcttcgggcgtgtcaattacacgatgatggacaagtatttgcttacggtaacggtacgtgccgatggttccagtaagtttggagatggaaaccgttggggcgttttcccctctgccgcattggcatggcgtatttccgatgaggcgtttatggctaatacaaaggattggttgtctgcattgaaattgcgtttgagttttggtacggctggtaacaaccggattaattcagggcttctttatactacttactcgttgagtggcaatgattcccgtaatcctttcttcaatggaaccagtacacctatgttggaacatgggacctatctttataacccaaagttgaaatgggagactaccgttacccgtaacttgggtattgactatggtttttggaacaatcgtatttcgggttcggtagatgtatattggaatacgaccagagatttgctgatgaaggcggagatacccggtaactccggttattcttatcagtatcagaattttggacagacttcgaataaaggtattgaaatgtcgatggatgcagtattggtagatacgaaaaacttcagcttgaactttactgccaatgttgcctacaaccgaaaccgaattgacaaattgaccaccgacagcccttggcagagtagcaattgggcaggaagcactatttccaaatatgaagatttccgtgtggaagagggtggacgtctgggtgaagtatggggattccgtaccaatggatattatacagtatatgatcctgttaccaatccgactggagaattggtatggggcgataaacaatgggtgctgaaagatggtatgaaagataacagccctacgataacaggaggttcttactatcctggcggattgaaaatacagaccgatgagaatggaaatcctttgaaacagcgtcttggaaacactgtagctccttgggtaggcggttttgggctgaatgggcgtttcggcaatagccgcaccggtgagttggatgtgaatatcttctttaactattctaccggcaatgtgattatcaacggtacaaaactggcatcgtctttccgttccggctctaggaccggttataacttgaataatgatttccgtcttggtaaccgatatacatggatcgatccggaaacaggcttgaatcttgccagctcttcaaccgcagtcttgaatcattatggtgacatgcaagctgccggattgcgcctgaatgaaatcaattccaatgccaatatgtataatccggctgctgcttctacgatgcagttaatagattatgcggtggaggatgcttctttcttgcgcctgaacaatcttactatcggttattcgctgcctaagcaccttgttaagaaagcattcttgcagaatgtaagggtttatctgaccggatataacttgttctgttggaccagctatagcggagccgatcctgaagtggatgtgagcagcaagcgcaacgccatgacaccgggtgtggactatgccgcttatcccaagagccgtacgtttgtaggcggcattaacattacattctaaaacctaacagatattgactgatatgagaaatatatataaaactttatgtttagcggcagggttggttgctatgacttcctgttctgattttctggatcagacttctccttccgaactggataataaaactacttttaataacacatactatacggaactgaccgtgaataagatttacggaagtctgactcaggaccaagcctactccaactttatgcctattatagcaggtctgaatacggattgtgaattggtggacggacttggtaccgatgccagcaatacctccagcgaacgcggtaatatgaattacaatgctaatccgggttggacgcaactttcgcgtgtatgggatgtgatgtatggcattattgagaacgccaatctggtaatagatggcataaacaacagcgagctgattaagacgaaaggcgatgattgcgatatgatgctacgcttccgtgccgaagctaaagtgttgcgtgcaatgatttatttcgacttgattcgccttttcggagatattccgtttgctaccggtgcttcggatagcaatctggaaaatgtgtatgtagggaagactgaccgtgatgttattatggaggctttgattggcgatttggaagaatccattccttatctgccttgggccggtggtacaacttacaccacagagcgtgtcaccaaaggatatgcacatggtttgctggcaaacatagcattgacccgtgccggatggtttattcgtgaagctgcgaaggaaggatatgtaacagctacggaaaactcagatccggcttatcctactcagcgttgcgatgatgaaaaacgtcatgagatgtataaattggcagaggaacatcttgccgctatcatcaatgataatacacactcgatgactcccactcttgcaggttattggaatggggtgaacttgtgtgaacaggataatacctatcgtgaaaatttgtttgaaatcccgatggggctgaataatagcagtgaattggggtatactgtaggatttcgtgtaaacggtgcttttcccggtggtgtgtctgaggaacataactatggtccgaaaggtaattccagtggtaagctcaaactgacagctccttattatatgtcttttgatgctgcagaccagcgtcgtgacctgacttgtgccctgatgcagattcgtacgaagagtggcgtttataaagaagatatgcttggcaatgctccttttgccatttattgcggcaagtgggactatcgtaagatgaaaaatcggaaagacggttggtgggatgctgtgaaagcaagcgaccagaaagtgtgcagtggcatcaatgttgtaaagatgcgctatcctcatgttttgcttatgtatgcggaggttatgaatgaactttacggcagctataatacaggtggcgagtattgttcaaaaacagctttcgaagctctttccgagatacatacacgtgccttcaacggtgacaaggctgctgcagaggctcatttgacgaaactcattaatgaacagggcttctttgaaacgattgttgatgaaaatgcctgggaattggcaggtgagggtgtacgtaaattcgaccttatccgttggaatctgctcagtgccaagattgacgagttcaaggagagctatcgtaatgcagtgaataatggttcatatccggctaaaatttattataagttcaaggaggataatttcacgattgatgtaaccacattcaattacaacgaacctgtggaagccggttactttagcgccaatttcttcggcagagagactacagatgccaagcaggagcaactgcttgttaatctgcccagtatttcggcaggattgaaccgtgtagtgaaaaaccgttatttgcttcctatcgcttctaccacgatttctacatcgaatggcaagttgcataattcttatggatatagtgattaatcttaaacactcaaggaaatgaaaaatatcagaaatatattggctaaaggagtatttatgctccttgtctctttacttgcaatggcatgtacagagaaaagcgattggggtattgatgcctcgtacagccgtccgtttggaaccaatgaggatggtataaatgtgacaaaagatgaaaaagtagctcgggttacggtaacttgggatgccatgcccggcgtagaatattatattcttgaaataagcaagaatgagctgactgatgaaattcctatgggatcggaagagaacggtaatcttgtttatgggaatacggtagaaaaccgcatattgaaagctccttttttaattgacaatctggaagcaggtgcggaatattatctgcgtattaagtctgtggcaaatggcaaggaatcctattgggcttatttagacgaaccgttcaaaacagtaacggaagaggatgtattgaatgtgcctgccgaagaggatcttccagttgcatcaggtaaggtacgtatgtcatgggaagctggtctgacggtaacgcatttcgagattgtgggcggcgctgctcctatagagcgggcaattacggctgaggaagctgctgcaggagaggcatggattgaaggactgaaaatattcacagcttatactatcagcatttataataatgaaacgttacgcggttcacaggaagtggtagtgccgggattggaaatagagtctaccgtagatgagattacagccaatacggcaagattctcttgggataatacagtggatgtggaccaatatatctgtcagccctcttcggcgcctactccggatgatgccaccggagcagtttcgctaagtgcttccgaggtaaatgaacatgccgttattataccgaatctggaaccaagtacagaatacacagtttatgctttctataatggggctatatgtgcacgtgctacatttacaacaaagaagggaaaacctgttgggtatacggaatataatggtgttgaggctttaatagccgattgggataacttgtccggtaatattttagtgacaatcagtgcagatgcggatttgagtaacaaatctgagatacctgctgcggttactaatattgtcttttggggtgagggagctacacaaccgaaattagctgttaagaatatgcaaactttaggggctattgataaaatagagttttataatctgaatatcagtgcacttagtaacgattgtgttattgctccgaatacagaaggttcttctatagcaaatattgaaataacttcatgtactatagaaaattatcggggtattgttcgtgtgcgtaaggtaaatggggaaagtagtctgaaattgaatattgatgactgtattattagaaacttgggtactaaaagcacaagtaactactatggtattgttcaaacggatggggctgtgaaatctgtaatcattaatatgatgaactctacttttgctaatccaggtggaaccagtgcatcgctcctaagagttgataaggctgataattccatttctgtaattaaaaactgtactttctataatttagttgataaagatgctcttgtgagaggagcgaaaggtagtcttactgtagaaaatgttttatttgcaggtagtaatactttccagatattctatgatgataaaactcttccggcttctttaaattggtcgaaagtttatagaacatcagaccttactgtttcaaaacctggttctacatctactacagctttgtcctattcttcatcccaactgttcccgaatgcatcttcaagtaccgatgtgcttgatttgactttcggtgcagatattccgaatgaagttaagataatcggtgatccgcgttggaataaataataaatttaataacatgaactaatatgaatacaaaatctatttatacagtaggcaaatgcttgctcctcttgttacttatcttcacaggttatgcctgtgaagataacgatgaaggcaaggaaaatacaagtgctcctgttcttatttcatgcaatatcaatggtacggaggttgatcttgctaatattgattcggaaacggagaacaatttgacggcgggtactgatggttatgtggagtttgtctttagcaaagccatgcgccagactccgccgactaaggatgaagaaaccggtgaagtgctgacaaccggaatttatttcaatgataaggttgcttccaatcagattgtcatcaattatgagaaagtccgctatccttattctgtcagtgaaggttccgaatgttccttatttatcgaggcaggtacattgacggatatgcagcatcgtccttacagcaaagatattactttgaagtttacagccacttccggtatttccggtggagatagcgaaacggtgtttgatgctgttgttgatgcaaacggaagaggtgattataccactgtacaagctgctattaatgccgctcctgccaatttgacatcgccttacctgatttttattgcagcaggaacctataatgaatgtgtatatatacctaaaacaaaaccgtttattcatttgattggagaaaatcctgacagagtgaaaattcaatttgcgttgaatcgtgtagaggagcaaactaattcggatacatggccttattctattcacaatcctaattcacctgcgcgccttgcaggatataccacagatcagaattgtgtagtattgattaaagccactgatgtttacctggagaacatttccattattaacttgtacggtgcattgaaaagccgctatgacggtggtcttggaaaaggtggacaagctgaagctctgtgtagccattatgatagattggctatgaataattgtaaattggtttcattccaggatacgtggtggacgcgtttccagaaagtgaacggaacgtatggtatttgccgggcttatgtacaaaattcatggattgaaggtagtacggactatatctggggaagtggtgatgtgctgatagaaaacagtactttttataacacgggcaatggtagttttattacggcttcacgtagtaacgaaaccgatgcttatgggtatgtgatgaaagactgtacgatagacggtgaggcaggtataaccgctttttctttcggacgtcagcaatcaacttctgcgaaggcggttttcattaacactgctttgaagatggatattatagacggtcattggactgcgggtagcgcagcgcctgctctttttggcgaatataatacggttgataaaaataatcaggtaatttcaacaggagatatgacagttggtagcggcagcagtcagtttactgcaaaagttctttctgcagatgaagctgccggatatacttatgagaacatcattgccagagagggatggaatccgaaacagtatatgcagaccccaggcactactatggctaccttggatggtactactttaagttggaatgcaatagacggagctgcaggttatcttatttttgtgaatggcgtctatttggcacagactaccgaaacttcggtatctgttacgactgctgctgacggggtatacacagtcaggggagtaggacactacggaagcatcagtgctgaataattgttttataaaagccggtaaatctgctgccggcttttatgtattaaaaaacttacttatgagaatattgaaactcgtttattttggtttgctgtgtttcatcctttctgcttcagtagtggcatgttcggatgataatccggtttctggcggaacggaagttccgccagaaactgataataatggggatggagataataatccggatacggataatacattggaagagtatcctgctccggaccgttcttcgattgctgcatttccaggtgcatatggcgccggtcggtttactacaggcggagcaggtggaaaggtgtatgtggtgacttcattggcagacaccaacgaaaaagggactttgcgttacggtatcagccaaagcggagcgcgtacgattgtgtttgcagtgagtggactgatagatttgaacagcccgctgaaaatagtaaatggtgacctgacaattgccggtcagacagctcccggagacggtatttgtttgaaaggttatccggtttctgtacaggctgataatgtcattattcgttttatgcgttttcgaatgggatctgataatttcacaactgaaggtgaggcggatagtggcgatgcacttttgggaaagcaacataagaacatcatcatagatcattgttccatgagttggtgtacggatgagtgtgcttccttttatgataatagcaattttactatgcagtggtgtattatcagcgagagtttgaaccgttctgtacataccaaaggtaatcatgggtatggaggtatttggggtggctcacctgctacgttccaccataatcttctggcacatcatagtagtcgtactcctcgtctatgtggcagtaggtataccggtaaacccggcaatgaaaaagtagatttacgcaacaatgtcttttataattggggacctaccaatggcggctatgccggtgaaggaggaagttataattttgtgaataattattataaaccggggccttctaccaatgaaaaaccaaatattgtcaatcgcatttttcagccgaatggagatgatggaaaaaataaaaatgcaaaaggaacatggggaatgttttatctgaatggtaactattttgatggtacatgccctcaattaaatcctgcttatcagtctttgctggaggaggtgaacaatgataattgggtcggtttgcagccgaatgagacatccggtgtactcttaccttccggtggaaagtctgctattcaggctaactcggaatttacaataaccgatgatgcggcattatttacgcagtctgcttcagaagcttataaagccgtactgctgtatgccggtgcttcgttgaagtctgatgcggtggacaggcgtatagtagacaatgtacgtaatggagattatacggcctcaggaagtaacggcagtgtgctgggacttattgataaggcaacggatgtgggaggatggcctgtatatgtgaaagagaatgcccctgtggatacagacggcgacggaatgccggatgcttgggaggcagccaatgggctgaatccgaaaagttctgcagatggagtcaaatataatctgagtaaggaatatacaaatttggaagtatatatcaatagcttggtagagaaactttatccggctaaatgatatttgtataattacatatttggattaaaaaacggataagatatgaaaggtatatattggttgttctatttgctatttgttttgggattcggggttatttcctgttccggagatgatccgattgtagattcggaaggaaatataggtagcaacggcgacgatgaaagcaatggtgaggaaaacgactctcctgataccggagtgaaaacattggactatggcgagttatttgcttttccttatgctgaaggtcatggtcgcaatgcgaccggtggccgcggaggtgctgtatatgttgtgacacgtttggatgaccctgccagcaagccggaaggaactttacgatatgcagtagagaaaagcggtgcacgaactgttgtttttgcaatttccggtactatcatgctggaacgtgaacttaaaacaaaaaatgacaatcttacgattgcagggcagacctcgccgggaggaatctgtatagcaaattatccttttaccataaactctgataatgtgataatcagatttattcgcttccgtccgggtaatatcaatacggataatgatggtctgggaggttcggataataagaatattattatcgatcattgttctgtaagttggggaacggatgaaggattgtctgtatatggttcggaatatactacggtacagtggtgcttggttgcgcagtcattgcgagcaactcctgccaaaataacaggagagaaatttaatactcatggatacggaggcaattggggaggacactatgcttcttatcaccataatataattgctcattgcgaaagccgggtaccacgtcttggacctcgctacacgacattggctcttgataagggtgaacttgttgatatacgcaataatgtgtactataattatgcgggagaaggctgttatggcggtgaagctcaaaaggtgaatcttgtaaacaattattataaacccggacctgcaactaaactttttaccggcagtaaggaaaaacgtcagtatcgcattgccaaacccgatgtgtatccgaaagattattcgggagcagattataaaaaatggcttcagacctggggcaggttttatgttagtggaaactgtgtggaaggatatagtgacgtgactgccgataactggcaagatggtgtattcggacaaatggatgctaaaaattgcgaaggcggggagagttcagccctttggaaagaacatacaagcataaaggtaaattctcctgtttccggagccggacatgtgacgacccattctgccgttgatgcttatgatatggttttacaatatgccggtgcttgcaattatagagataagcttgatgaacttattataagtgatgtcagaaaaggtgtggcaacttgtacaggcagtgccaaagaatgggaatcattgaagggatggtcggataataaaccgggatatatcaataagccgtctgacattggtactaatgccggacaattggatgaaaagggattcccggttctggcaacagatactgaaatatgcactgaagatactgacagtgacggaattccggattattgggaaaaggaatatgggcttgattttaagaaaaatgatgcgaatgaacggactgttgatgttaatggtaaatatactaacatcgagatgtatatgaacagtcttgtacacggtattatggaggctggcagtaaaggcggtgctgtggctgattgagatgtgttttgtttaaaaagaatttgttatgaaaaagaacttgttattggctgtctgcatggcaggggttatggtatcttttgtttctgaggcatttggacagagtttgccggtatatgatactcccgaccgttctaagattccggcttttccgggtgcagacggagcaggaaaatacacaaccggaggagccggtggtgaggtattggtcgtaaactctttgaaagatgacggaacagagggtactttacgttgggccttgagaaagaagggacctcgtactatagtttttgctgttagtggcttgattgaattgcagtcacctctgaaaattaataacggtgatgttaccattgctggacaaacagcgccgggagatggtatctgtttgaaaaattatacgttgagcgtacaggcagataatgtaataatccgttttatccgttcgcgtatgggggcagagataaaacaaaaaggcgatgatgcgatgaatggttttaaacatcatcgtaatatcattattgaccattgctccatgagttggagtaccgatgaatgtgcaactttttatgataacagtaattttacgttgcaatggtgtattatcagcgaaagccttgcaaattccattcacgaaaaaggtgctcatgggtatggtggtatatggggcggtcaaacggcgtcttttcatcataacctgctggcgcatcatatgaaccgtactccgcgtttatgcggaagtcgttatactggcaagcctgaagatgaaaaagtggatttgttcaataatgtaatctataattttggtagtgatggagcgtatgccggtgaaggaggaagctataactttataaataattattataaaccgggacctcatacggctactaaatcatcttacaaacgtttgtttactgcttattccgatgatgggaaacatcaaaatgtaaaaggaacgcatggtgtattcttcttttccggaaattatatggatcctacttgtgaaaaactgaacgagaaacaacgtcaggagatgatgttggttaataaggataatacagttggattgatagtgaagaataattttgctccgaaaagcgatttgctggcaaagcagccgttcgattttgcagaacgtacttctttgcagtctacatgggatgcttttgaagctgtccttcaatttgccggcgcatcatacagccgtgacataaatgataagcgtattgtagaggaaacccgtaaagggatatataccaatgagggtagtcatgggagtacaaatggcatgatagacagaccggaggatgttggtgggtggcctgaatataattctaaaacagctttgactgatgccgatttggatggtatgcccgatgaatgggagatagctaacgggttgaatccgaatgatgcctcggatagtaaaaattataacttaaatgcaaattatacgaatttggagatttatctgaatagtttagtggaacatctctttccctaataaatctcttctttcttaaataggagcatttggtgactatcctaaagaataagatggtatatggaaatgattgattataattactccatataccatctttatatttaatattctctattgtctactaattcttatctattcagacatactattttgaaaagaatctgagcctatttatgagatagcatcaataaagacttggaattttaaatgtatatgtaaccttacactatggtaaactaatcggtagggagaaacgtatatctttctccggctttggtcttgatgtcataaatatacgattgctgcttttgaggtactgatagcggtgcactggctgcaaccaacggcttccgtatcggttgggatagcagcagcggattattgcatgactcttctgtcgccggtgtcagtttttctccattcagatataaaggggaggtggtacgtatgcgtaaggttccgccgatgttggaagttatggtaaccgtttgcacttttcctttttcccatttcatctcttccagcagaaaaccgccgcgacagcgaattccttttatagtgccatgctcccacacatcgggcaatgcaggcaggagatgaatggcaccgtcatggctttgtacaagcatttcggctatgccggccgtgcagccgaaattgccgtctatctggaaaggcggatgggcatcgaacagattaggataggtccccccgttttgtccgcgttcatcggtggtggggtggagttgttcggtaatcagtttataggcgtgattaccgtcgagcagccgtgcccataggcagactttccatcccatagaccagccggtggagtggtctccacgggcaatcagcgatttcttggccgcttcaaaaagaacgggagaattataggcgctgatttgacggccgggatatagtccccataagtgggaaacatgacggtggtgatcctgaggattgtcccagtcttccatccattcttgcaactgtccccagcgtcctacctgcatgggtgccaaatgcttggccacggtttgcaggctgtctgtgaaggatttatgctcattcattaaggtggcggcttgaatggtattgtggaagaggtcgtaaaccatttgattatccatcgtagcaccggcaacaattacaaaatcgcgtttaccgttaacagacggactgttttccggtgaataggaaggagctactaccagccagttgttttggggttcgtgtactaagaagtccagataaaattcgcaggcgccgcgcataatcggataaacctctgccaaatagttcttatcgccggagaacagataccgatcccataagtgctggcagaaccaggcgttacaagtgggccaaacaccatatttaggaccgtctacggcgcctgtactgcgccatatatcggtgttgtgatgcaacgtccaaccacggcagccgtacatggcggcactctcgcgaccttgtatggctacttcttttaccaattgcagaaacggctcgtgcatttcgggcaaggcagtggtttctgccggccaataattcatttctacgttaatgtcggtggtgtacttcccgtcccagggagcacgcaactgatagttccagatgccttgcaggttggcggcttgtccacccagctgtgaagaacatattaagagataacgtccgaattggaagtatagggcagccatttgcggatcggcagtagaactgaattcttttacacgccggtctgtcggtttcttgatttgggaattgctgcccaagtcgagggaaacgcggttaaagtatttttgataggcggcaatgtgggattcttttctttttgcgtagttcttgccggcctgcttcatgtattgccgtgcggttttaagtgcatctcccgatacgtctttgtagtttatgaagtttgtaccgatggatacgtacagaacaacgctattggcattcttgacttgcaaagtactgtcggaggttgcttttagcgtaccgccgttattctcaatccgggtaagtgcggtgaatcgaacctttccttcaatgccttcgtggtcgttggcctttccgttgagttgcaattcgttgagggaagagatgcggcgctctgtgttttcgatataaggagtggtgtaatgcgcagtgaaagaaatgcttctttttttcgaggctgttagtctgataactaataaccggtcgggaaatgaggtgaatgtttcccgtacgtaagtaacgccattggctgtgaaacgggtggtggctattgccttttcaatatccagatcccggtaatagtcatcgtatttactgattccttcaaaatcgagatgcagtgtgccgaccgtttgatacggcattccattggcggattgtgaacagatggcagggccgcataactcttgcgcttctttatttttcccttcgaatatcagttggcgtatgcggggcaacgcttcttttgccttgggattggtgttgttgtgaggtgaaccgccccaaacagtctcttcattgagctggaaccgttcgtgtatggggtcgccgaagaccattgctcccaagcttccgttgcctaatggcagagcttctacccattgtctggcagggctgtcgtaccatagtttcaggacggtatcattttgtgccgtgaccttaccgctgatacagcaaaaggtaaggattagcatgaaccattttttgatcatagcttgtcagtttatccgttttaagatttcttccgctttgtctgcgatataatcggggtgaaactcctctaactctgtccgtgggcggaaaccccaggttactccgcaagacgttactccggcattgattgccgtctgcatatccacaccggaatctcctacataaagcacatcttttctatctgttttggcaatggatagaatatcgtctacaatggtcggggcgggtttcacgtttactccttcccgttggccgaatacggcgacaaagtttattttcgggaaatagtgagctatcagtttttgggttgctgcttggtatttattggatgcaaccgctatttgcagtcccagcgactgtaattgttccagcagttcgggtatgccgggatagggacggctcttgtcggcattgtgtgcatcgtagtaaggaatgaattccttacggacacggagcacattttcctcgctcttctctccttcgggaagggctcgctcaaatagtttgttgattccgttacccaccatgaagttataggctgattcctcgtgggtggggtaaccaagtacgctcaatgcatggttggtgctttgcgccaaatcggcaatggtatttaataatgtaccgtctaagtcgaatataacaagtttcttcattgttttctcttttttattttgggaacaaagatataacaatttgcaggggttatataaaaactcaccatagataacgcggattaataccgattttaagatagatacctgataaaccggaaatcaatgttatctatggtgaggcagtatttccatgaagcctgttatctggtaattctgaaccagtctacatctgtccagccgccgtcgttggtaacgatagccgggcgggtacagaacatgccaactttggcaccgatccacttgccttcttttacttggaacggtttgcccaatggctggaatttctttccgttgaggctgtaactgaagttacacattaccaacaggtcgtgtccgccttcgctcttggaaatctttttcccgtcagaggtgaacttggcacgcaggtaaatcgtattatcctttaaatcgactgtaccgtttacggtttcggaagtacctttgtctgctttggggcaagacacttgagacaatatcaggcctttgtccgtattctccaggataagtccggcgtagtcaagtcccataactaccagtccggtacgttctcctttgtatttctccgtcggtttgaaggtcagcttcattgtggcggtaaagttgtcggaaggagttttttgcaacaataggttggctgcatcccaaaggttcttatattctttgacaaccgggtaggagtaaagacgtacaatactctggtcgcctgcataataggcccatttttcattgatgttggcatgccattgccactgcggggagagggtataaccgtcaaactcatcgctttcttgcggagtgcggataggatatgtcttgcctacgttcggtttcgtatgcaccagaaccgggtcgccgcagccgtcgccgtctttgtcgatgccgataaccggccagtcgtttacccatttcataggttgcaggtgcaccagacgaccgtatgcgccgacatcctgaaaatgcaggaaccagtcttcaccggtaggagtgtctacccatgctccctgatgagggccgttgatagggctgttaccctgtgccagtaccttcttccattcgtaagggccgtatatgttcttggagcggaggacaacctgccagccggtgggcacgccgcctgccggatggaagatgtagtaatattctcctcttttatagagtttgggaccttcgcaggtctgatgcgcttcatgaccgtcgaagatgatgcgcgattgtgttatggcttgggtggcatccgcattcaactcgcagatggatatgatgcttttcaatccggcacggcttcctgcataggcgtgtaccatgtagacctttccgtcttcatcccagaaagggcaggtgtctatgatgcccttgcccggttttacgagcacgggttctgtccacgggcctttggggtctttggcttttaccatgaacgcgccttggtcggggtcgccccagaaaatgtagaattcaccgttatgatggcggatggcaggcgcccatacacggttgccatgctccggacgttccggtgtttcgataggggggagggcgtagggaacggcagcgccgatgatactccagttaacgaggtctttggagtgtaaaatctgcagacccggcaggcagttgaaactggaagaggtcatatagaaatcatctcctacgcggcaggcatccggatcggaatagtctgcgtagagtatcgggttcttatatttaccgttgccttggtcggctacccatacctcggaaacataattcttttcttgtgccgccagcggcattgccagcagcaggctgagtcctaaaagtgcgtttctgcttttcatgttacgatttgattctttgagtgtttaattcttgattttaatctgaacagggtgttgcaactcttctttccactcgcgcatataggcaaaccatgcttcgggagtaggatatccgaaagtttccttgcatgaagtaaacatggtgtaatggtggaaacggtcgcgacccggtgcagaaagggtataaaggaaattatctttatcttttacttcctgacggatatatttctgaggaacataggtggcaatgcccactgtctctttggcgtattttacggtgtcgttgaccggccagtgccttccccaactgcctatcaatcctttgtgatctgattccgagcgtgtttcgttgcccatgatattctgcacaccggtacagaacacttcgttctccagcggttcgtcaaagaaagtctctaccagcaggtcacggtgtccggcataaaggatatagcggttggtcatgttcaattcttttccctgatagttccagccttttacggttacatcgactatggtgcgtatagggccataagcaagaatgctttcggtgcggaaagctatcggttctatgtggatggccttcgttccgtcccaacctttcagggcgccgacaccgcaactgttgccaaccatcagtacatcgtctccgaaaccgcgtgcaagctgttcgtcattgggataaaaaccgctttccttgatttccagtccttttttaaacttgccatacgggtcaacggtttgcttttgattgaaataaacgcggtaagccactaattccgattcgaacatcggcccgtgcccgtgtagcatattataaaaattggtagagcccggtactgtaaccgactgtgtgggggcgtgcttctgcttttttgcatcgcgtatcagcatttcggcaaatacacgtgccggataggtcttatctgcttgggcggaagacagggtaattgccagcgttttcttgctttgggcaggaatgtccatgacaaatgccagctcatcggcttttaaatcgccgttcaagtcgtccagttgcgaggggatttcctcactgccgttcattacaacagccgaacgtacgcggaagccgggttgcaggtctttgattttcagtactaccggagcatcgctcttgtccttgctccatgagttggttacttctaccgaaatggttttggtatttggttgtgattgtgcggcaagagtgcatgcgcacattaacaggaaaccggttaaaaaggtcgttttcataaggaatgtgtttaataaactgcggcaaaattaaactaaatagagcagacagctcttttccttttggcaaaaagactgtctgctttgcgcttattgcttattgaactttacttaaaaatccagcatttttccttctgcgccaatagcggaatatacttttccgtccactttcagatttttggcgtttttcacatccaatgtgtgtcccttagtctctatacgtatgttttccaatgtgacaccttccgcctggctgatgacaacgccttctttggcatcgttgatgattacatcctttatggttatattcctgatgggcatttcgggcagtccgttgaagaacatggcgcgtccggaacccttgcagatgatattggagatgtgaatatcccggaaagaaggcgtttcaacagtcacttggggaactgctgtcttcatgcggcctttcaggtcttcttccgtttcttcaccggcagccttgccgccatagaataggtcgaagagcagtgcttcgtggggtatatcaatcatgtggatgttgtgaatatagattccctctacaacaccgccgcgtcctctggtgcttttaaagcgcaaacctacgtctgtgccgaggaaagtgcaatctgttacataaatatttttcacgccgccggacatttcactgcccacaacgaaaccgccatgaccgtgtaacacagtgttattctttacgataacgttctggcaaggttcaccgcgtttgcgtccgtcctcgtctttaccggatttgatgcagatggcatcgtcaccggcatcgaagatgttattgattatcaatgcattcttgcaggattccaaatccagggcatcgccgttctgagaataccagggattgaatacttttacttggttaatggtgatgtgctcgcatgatagcggatgcagacaccagcttggtgagttcttgaatgtaacaccctctaacaggactcttttactcttgacgatattgagcaatacggggcgcaaccacggacggatttcattccattcctcgtctgtttcgataccttcgggattattgaagttcttgcaggccaatgctccctttagcgatccggctgtgggataccatatggatttgtctactacaccgcccgacttgacaagtgcatcccattggccggcagtcagtttgctttttttcaccggacgccagctatcgcccgaaccgtcgaatacaccatagcctgtaatggctatgttttctgcgttgcgcgcagaaataggcgactggcaacggcgggtattcaacccttcaaacgatgtctcaagaatgggataggcattgaaatcatctgtaaagacaacgagggcatttttctccgtatgcagattgacgttgctcaataactcaataggacctgtcagccacaatccttctggaatgactactttaccgccgccttttgcattgacggctttaatggcatcattaatcgcttttgtgtttaaggtagttccgtcgcttttggctccgaattgcaggatactgactgtataatcaggaaacgacggctgctcaacctttggcatgttgaaaggcaattctttatagatgttctcatctatagaatttttgcattgggcatgaacagcattctgtgcaggcagtaatgcaagagaaaatgtggtaagcgtaaatagcttttttagtaatgtgttcattcgtgatactatgttaatgaatttatgaattctgatttgcggattaagcggcatttcctaatctttactttccatcttattacttccccgtaagctgctctcacgagtggcttacgaaagaaataataaatgattcatgttaacctaattctaaccttaaataaattattatgaaaaaacctcttaattaccgtttgcaaatgtatcgggctttggtagaaaagatgtgtacaaattgttggttttggtgtattttttgcggttttacccttttctttgtgtgcattcggggtttttgcactatctttgcaactcaaaacttagtaaaaaaggtatgagttacaatttgttgaaaggaaaaagaggcattatttttggtgctctgaatgagcagtccattgcctggaaagtagcagaaaaagcagtagaagaaggtgcaacgatcaccttgtccaatacacctgtcgctgtacgtatgggtgaagtttcggcattggccgaaaaactgaattgcgaagttatagcagcggatgccaccagtgtggaagatttggagaatgtattcaaacgctctatggaagtgctgggcggtcaggtggattttgtccttcattctatcggtatgtctcctaatgtacgcaagaaacgtacatacgatgacttggattacgatatgttggataagacgctggacatttcggcaatatctttccataagatgatacaggctgccaagaagatgaacgctattgccgaatacggttctatcgtggctctgagttatgtggcagcgcaacgtacgttctacggttacaatgatatggcggatgcaaaagcactgttggagtctattgcccgtagctttggttatatctacggacgtgagcacaatgtacgtgtcaacacaatttcccagtctccgacaatgaccactgccggttcgggtgtaaagggtatggacaaactgttcgactttgccaaccgtatgtctccgctgggtaatgcttcggctgacgaatgtgcggattactgtatcgttatgttctccgacttaacccgtaaggttactatgcagaatttgttccacgatggcggtttctccagcgtaggtatgagtttgcgcgctatggctacttatgaaaaaggtctggatgagtacaaagacgaaaacggaaatataatctacggataaaaaaggatgatgaagcggtaaagtgatagggtattcaggctcatagccttatcgccttaccgctttaccgcttttttatatccctttataaatcttaccactctatttttatttctttagttgatttacatggaaactgctctttatctgttgcctgttactttaggcgatactcctgttgaaaccgtattaccctcttataataaagaagtgattttaggtatccgtcattttatagtggaggatgtgcgttcggcacgtcgtttcctgaagaaagtcgacagggaaatagatattgattcgcttacgttctatacgctcaataagcatacttcaccggaagatatatccggatatttgaaaccgcttgaggcaggaaatccaatgggagtgatttccgaggcaggatgtccggctgttgccgatccgggggcggatgtggtggctatagcgcagcgtaagaacttgagggtggttcctttggtcgggccttcttcaatcatattatcggttatgggttccggttttaacggacagagttttgcctttcacggatatttgcctattgaacccggtgagcgtgccaagaaactgaaagcgttggaacaacgcatgtataatgagcatcagacccagctttttatagagactccctatcgtaacaataagatgatagaggatattctgcataactgccgtcctcagaccaaactttgcattgctgccgatattacatgtgagggagagtatattaaaacgaaaacggtgaaagaatggaaagggaaggttcccgatttgtctaaaattccttgtatttttctcttgtataaataatttcttttgtgtgttcgtattcacgttcgaaacaactgctgaaaaagtttctgtgaaggttatgctctatttgctggaatgtccaaagttttccgcctttgaactttttgttgcataggatggaatcattgttcaggtcaaggataaagttgtagaccaggcggttggtaatttcattctcaaagtggtacatgaaacagaagtggagattttggggcggagctgagggaaggatttcttgtaagattctttcagcaccttgttccagagtttctccatacaataagtagttctccattaatatatccgttttgcctttttcgagtatgctgcattgaggacggggcagtaaaaacagcataccgtgtgaagttacggtgatgcggataacgggattgatatattcgtttttccggttgatggcttctgaggccattgcttttccaataacatctcctttttttgtcacgataggtacaaatacggtatgactcattatcttgttgaaatagtatatgccgaactgattgaacaagatacccagtatgaatacgcagggcggcatgatacggaataaaatgtagcgtagcgtatcgttcagcggatgcccgaacaatatggcaagcgatatgataagaaaatgcaggaaaccgatgagcagtaatacacgggccgatactatggcggcttcggctccttgtgcaaaaaactgcttgcagcatttatgggtctgggctgtgtgatagttcaaaaagcgtcttctattcagaaagatgatgagcggaggtataatcgcactgatttccagcgtaaacggaaacattgcttccggacaataatcagcggaaaaaaaggaagttattgtcaataacagtaacattcctgtcgtgctgtataatatgaattgggggatatgcggccccttgcgctgccacatatagatactggacaacacacctacgcctgcaccgatgtagatagcaatgtcttgtattatgaattcacataatataatggatataataacgggaatatatccgagcgacatattaaacttagatgatagaattcgttgcttgcccattactacgctattttgccgtttcctattcaacaaacagccggtataaaatgttctttatttcattttttttgtagatattgggttgatttttctgcatggtaggacgaacggaccaatggtgcgctttctacctgggtgaatcctttttttaatccgagttccttgtaggcggtaaattgggcaggggtaacatattctgctacgggataatgcttatgcgtaggttgcagatattgtccgatagtgagtatccggcaacctgcgtcgcgcaggtcgtccatgagcgctgccacttcatccggagtttcccccaatcctaccataatgccggatttggcaacagtgccgctttcggatatctgccgcaatacttcaagacttgtttcataatgagcagcactccgtaccagcggactgatacgttttacggtttccatattatgggagattatctccggccgggcttcgataaccatgtctacgagttcctttcttccctgaaagtcaggaatcagtacttcaacggtcgtatccgggttgaggcgtttgatttcgcggattgtttgcacccaatgggcggctcccaaatccggcaggtcgtctctgtctacggaagtgacaacggcgtgggagagcttcattaaggcgatggattcggctacgtgcaccggttcttgcgggtcaagcggcatgggcttgcctgtttgtgtattgcagaacttgcagcaacgggtacagatatctccccctatcataaaagtggccgtaccttttccccaacattctcccatattgggacaacgtccgctgctgcatatcgtgtgcaggcagtgggattctacaatgcgttttgtctcggtataacgttcgttggcaccgatacttattttgagccattccggcttacgtactctttcgctcatttactttttcaattcccgattaaagaagttcgttaatttggtatacagatgcagacgggtgttgcctccgaagatgctatggttgcggttggtataaacctgcatgtcgaactgtttgccaagttgtacgaggtgttcggcatattccgcgcaattctggaaatgaacgttatcatccgccatgccatgtaccaacaacagattgccatgcaagttgttggcacgggtaaaggcggacgaggctttgtaaccttcggcattttctttcggggtacgcatgaaacgttcgccgtatacggtatcgtaatagttccagtcggtaaccggagcaacggctgctccggctttgaatacgggagttccttcgctcatgctcataatggtcatgtagccgccataactccagccccagattccgatacgatttttatctacgtaaggttggcgtcctaagtacagggcggtttccacttggtctttggcttctttgacaccgagattcagataggtgcttttggcaaattccgcaccgcgtccgcccgtgcctcgtccgtctacgcacactatgacatagccttgggaagccatgtaagtttcccagctcacgccgaacttgtcaagtacctgctgcgagcctggaccgctgtactgatacatcagaaccggatattttttgcttgcggagaagtttgccggctttatcatccagccattcagttcagtgccctcggaggtctggaaagagaagaattctttcttcggcatatcatatccgtttaatttctgcttcagtgcggcattatctacaagtgtggtcagcgttttgccgttattgtcgttcagggtgatgacagtcggaatgtccaggcttgaatagcggttcatgaaatacttcatgtctgtactgaacagggcgctatttgtccctgtatgcgatgataactttgtttttttgcctttgcggtctatcttgtagatagcgctgcgcagcggactttcttcgttgctgctgtaataaaaacttccgttttcggggtcataacccagaaaatcctgtacttcgtatgagccggaagtgacctgtttgataagatttccgtttatattgtaccagtacaagtggttgtatccgtttctttcactgacaaaactgaaagtctccggatagaaaatgatgttgtcaaatacattctcgcggatataagtgccgctctcatcacgtacggccaacttgcatacggtactgcgagggtcggcaaaatacaagtcgaaccggttctggtggcggttcagcgtcatgatggcaagcttgttcgggtcttgtgtgaaacggatacggggaatgtagccgccttcttccaaaggaagattgattttgcgggttactttggatttgatatcaaaagtatgtacggatacttttgaattcttttcacctgtcttgggatatttataagtatattctcccgggtatttctcgtaaggggcaatatgaggcacttctccggcaaataccgggaaagtataagagggaacttcccgttcgtcgaaacggatgaaagccagcatcttgctgtcgggactgaattccaaggcacggttaaatgcaaactcttcttcgtatacccagtcgggaatgccgttcagcacttcattgcggctgccgtcttcagtcacctggctttcgctgttgccgtaaagtaatttaacgaggaagatgttgttgtcgcgcacaaaagccacttggtttccatcgggcgagaagatggggacttgttgcggtccgccgtccgacagtttctccactacattgtttatcttgccgtccaaattccgcttcaggctatatatataatgtactgctgtataagagtggcggtatacaggcactgtttctgttgcaataagcaatttgctgccgtccggagcaaagctgtagctgtcgaacttcttgaatggacactcgcgggcagtagccgcatcgaacagcacttctaccggtttacctgtcttgaaagagtatttgatgatttgtgtcttatccgcattcatttgcgaataatgttcgccgtctcccggaatagggatgacacccgaaatgttttgagggataaattctccggatacgatttctttcaaatcgagtggcttgctgttctgggcaaagcctgccagtgcacaaaggcagaaaaaaagtgcaaaacttatttttttcatatctcttaattcggttattcagggcaaatatacgataaagcgaaaatctaatctaattaattaatgataaattccgttttgtgtcaggaaatttttccggcttttccaccatgtcgtgagttttctttaataattcccggcagaatgcagagggtaaataatttatttgagtgaacgcttaaacaaaacaagcatgatagccagtgaacctatcattatataagggtaaagcacgatgccgttgtcatatgtgaaaaccattcccatcagtccgttcatggcagtttgtcctataagggcgatggcgagcgctatgccgaatgccgttcccgacaatgaagggtagcgggttccgagaatactcaggataaccggataagtagacgataatcccattcctattacagccattcctgcagcagtccgtatgaaaccgggagctgctgtcagcagggcaaagcctgttgcagtgaggataagactgtaggggagcacctttgccggttgtatctttttgaaaagtacgatttgcagcatacgtgctacggtgagtccggcaaccatacaggtgagtgctatcaatccctgattggcaggtatgtcggttacctgaccgaaataactggtggaccagttattgcatactccttcaatgccgctttgaaagaatagaatgaagctgagcagcagcaggctgctttctttcagcaggcctaatccttcctttacaggaaatccctgtgcttgtttgggtgcgggaaaacgtatggggatgcagaacaatatacctgccagcataatgatgcctataccttgcaggatggtttcaaaagagtaatgctcggacaggattcccaaaaggcttggtatgccaagcgctcccaacccgtagaacactcccaggaagctgatccgggagcctttttcggattctccggagatgtcggaaaccaaggcgttggtttcaccgttaaggatgccgccgcccagacctatgcctacaatggagatttgaaggagcgggatgctttcgaagaatatcagtccttccaatcccgataatacgatgatgcaactgggcaccaacaatgctttgtgtccgaaacggtccgcaataggaccgaaaatcaacgaaccggccagcatgccgatgggaagaaaggttaccagtgacgtagtttgcagtccgcttaattccagttttgtgacgagagaaggcagtaccgaacccaatgtaatcattgaaacaccgaaaaaacacattccgatgcacgctgccgtgaacacaagattcttatgataaccgctattcatacaaatgttttttttgatggtaggaatattttgttgtgtctttccatattatatacaaagttatgaatttatttcaatcgctatgcttccggtattataaatttgcatgtagaatatgtaatcggactctgaaatgtatttgttgacgaatatgtgcctcttccatggcagttgttaacatatctaatccgttttctattagtaaaaatcgaagaaaagttttacttttgtttctaaataacataggcttatgagtgcgactcctctttataatgaatttccttctttcctgaaacgttattttccgtataaggtacagaaaatttcgttgaatgccgggtttacctgtcccaaccgtgacgggagcaaggggtacggcggctgtacctactgcaataaccagactttcaatcccgactactgccgtaccgagaagccgatagccctgcaactggaagaaggaaagcgtttctttgcgcataaatatcccgaaatgaagtatctggcatattttcaggcttacaccaatacgtacggagaactggagtccttgaagcggaaatatgaagaggcattggcggtagacggagtggtggggctggttatcggtacacgtcccgactgcatgcccgatgatttgctgcggtatctggaaaatctcaacaagcatactttccttttggtggaatacggtattgagagtactcgcgacgagacactccgccgcattaaccgcgggcatacttttcaagttaccgtcaatgcggtggagcgtacggctgcttgcggaatactgaccggcggacatgtaatcctggggctgccgggcgagactcaccgcagtatcgtggcacaggcgaaggacctgtcgcgtttaccgcttactacgctgaaaatgcatcagttgcaattgatacgcggcacccgtatggctttggaatatgaacggaaccccgaagacttccatcttttcaatgtcgatgaatatgttgacctcgtggtggactatgtagagcatctccgtccggatattgttctggaacgcttcgtctcccaatctcccaaagagctgcttattgcacccgactggggactgaaaaattatgagtttaaccaccgggtgcaaaaaagaatgaaggaacttgacgcatatcaaggaaagaagtatgaaatgtgagaaaaaagacttatttttgccgctgattaaatatggaatcaatctaaattagaagataataacaatgaacccaaaaacagtgataaaaggaaaaatccactatgtgggagtgaatgaccgcaataagcatttgtttgaaggtatgtggccattgccttacggagtgtcttacaactcttacctgatagacgatgaaacggttgcgctgattgatactgtagatatttgttactttgaggtatatcttcggaagataaagagcataatcggcgaacgtcccatccagtatcttatcatcaaccatatggaaccggaccattccggctctatccgcttaatcaaacagcattatcccgacatcatcattgttggcaacaagcagactttcggtatgatagaaggtttctatggcgtgacgggcgagcaatatatggtaaaagatgaagactttcttgccttgggccaccacaagctccgtttctatatgactccgatggtgcactggcccgaaaccatgatgaccttcgacgaaacggaaggcgtgctgttctccggtgacggcttcgggtgcttcggtacgctcgatggcggattccttgatacacgcatgaatctggataagtattgggacgaaatggttcgttattactccaatatcgtaggcaagtacggctctcccgtgcagaaggcattggcaaagctgggcggtctgcccatctccaccatctgctccactcacggaccggtatggacggataatatcgccaaggttatcggcatctacgatcgcttgagccggtatgcggccgaagagggtgttgtcattgtctacggttccatgtacggcaataccgaacaaatggcggaagccattgctgcggaactttccgttcagggcatcaaaaatattgtgatgcacaatgtcagcaaaagtaatccgtcttacatcatagccgatatattcaaatacaggggtctgataatcggaagtcccacgtatagtaaccagatttatccggagatagaatcactgctctccaagatattggtacgtgaggtgaaaggccgttatctgggttacttcggttcgttctgctgggcaggtgcagccgtgaagcgcatgggcgaatttgccgagaaaagcaagtttgaaatcgtgggtgatccggtggaaatgaagcaggccatgaaggacattacctacgagcaatgcgagaatttggcacgcgctatggcggaacgtttgaagaaagacagacaataaagttacccctaatttattaacctgataaaataattgtaatgagactaatcattcaaccggattatcaatccgtatcacagtgggcggcacattatgtagctgccaaaatcaaggctgccaatcctacccccgaaaaaccgtttgtattgggatgtcccaccggttcttcgcctctgggtatgtacaaggccttaatcgacctgaacaagaaaggtattgtatctttccagaacgtagtgactttcaacatggacgaatatgtaggcttgccgaaggaacaccctgaaagctactattcctttatgtggaacaacttcttcagccacatcgatatcaagccggaaaataccaatatcctgaacggcaacgctgccgacctcgatgccgaatgtgcatgttatgaggaaaaaatcaagtcttacggcggtatcgacctcttcatgggtggtatcggtcccgacggacacatcgctttcaacgaaccgggctcttccttgtcgtcgcgtacccgtcagaaaacgctgactaccgacaccatcattgccaactcccgcttctttgacaacgatgtaaacaaagtgcccaaaacatctttgaccgtaggtgtaggcactgtgctcagcgcaagggaagtgatgattatcgtaaatggccacaacaaggcccgtgccctttatcatgcggtggaaggacctgtgatgcagatgtggacaatcagcgcgctgcagatgcatgaaaagggaatcatcgtttgcgacgatgctgctacggcagagctgaaagtcggtacatatcgttatttcaaagacatcgaggcagaccatctcgacccggagtctttgctgaaataagaacgatacattttagataaacggccgcccgttcttctctttgttgtgagaggacgggcggtttttacttgtaaggaaatttatctgctacgctttaatatgaccgtaatcaggtatatgtatccggtttcgtgatagcgtaacaggtgttttttcattttcaaactcttaaaattggaaacagatagatgtaattatcctatttctgctgtatgaaagataagaataaaatcatagtcaatccctatcaatcgccctgcggcgtgctgttgcttggttcgataggcgataaactctgtctttgcgactggcggacggaaaagcatagtgcccgggtggacaacagactgaaacggatgtggaatgccgaatttgaggaaggtacttcggctgtaatcgaaagcgcccggcaacagttggacgagtattttgccggaaagcggcagacattcgatataccgctcctgttcataggtacggattttcagaagacagtgtggagtgaattgttgaagatacctttcggcacgtcagtttcctatggagaagtggcacggcgcatcggcagacctgcggcagtgcgtgcggtagctaatgccaatggagcaaatccgatgtcgatatttgttccttgtcaccgggtaatcggcagtgaccgttccttgaccggctacggcggcgggcttggctccaaacagagattacttgagctggaaggggttttgtgatattgattacaggctgaagtgctgcttttccggataccatataataaggtatatagccgatgtgttacataacatagtttagtaacacagacgttttattgcttttcttttgattaatttctaatttgcggctcactaaaataatggcatacggaagcatgctgagtattcactttaaatcttatatatcatgaaagtatatcagacgaatgaaattaagaacattgccctccttggcaatgacggctcgggtaaaaccactctcacggaagcgctgctctttgagagtggtattataaaacgtcgcggcagaattactgccaagaatacggtcagcgattactttccggtggagcaggaatacggctattctgtgttttccaccgttttccatgtggagtggaacggtaagaagctgaatatcatagactgtccgggcagtgacgactttgtgggagcggccatgacggcactcaacgttaccgatacggctatcctgctgctgaacggacaatacggccccgaggtaggtactcaaaatcatttccgctatacggagaagctgggcaaaccggttatcttcctggtaaaccagctcgaccatgagaagtgcgattatgatatggtattggagcaactgcaatcaatctatggttcaaaagtggttcccgttcaatacccgctggctaccggacctaatttcaattcgttgattgatgtacttctgatgaaaaaatattcgtggggaccggaaggcggagcacccacaatcgaagatgttcccgctgaggagatggagaaagcgaccgccatgcataaagcattggtggaggccgctgccgaacacgatgaaaccctgatggagaaattcttcgaacaggattctctgaccgaagacgagatgcgcgagggcatccgcaaaggattggcctcccgcggcatgttccccgtattctgcgtatgtgcgggcaaggatatgggtgtgcgccgtttgatggagttcctgggtaatgttgttccgtttgtagacgaaatgcctccggtgcacaatacacgcggtgaagttgtgaaacccgattccaacggacctacttccctgtatttcttcaagactgccgttgaaccgcatatcggtgatgtgcagtatttcaaggttatgagcggcaaggtacacgaaggagaagactttaccaatgccgaccgcggttctaaggagcgtattgcgcagatttacgcatgtgcaggagccaaccgtatcaaggtggaggaaatggtagccggtgatatcggctgcacggtgaaactgaaggatgtgcatacgggcaatacgctgaatgccaaaggggctgagaatcgtttcaacttcattaaatatccgaattccaaatattcccgcgccatcaagccgctgaatgaagccgatacggaaaagatgatggttatcctgaaccgtatgcgcgaggaagacccgacatgggttatcgaccagtccaaggagttgcgccagaccattgtgcacggacagggtgaattccacctgcgtacattgaaatggcgtttggagaataacgagaaattgcaggttaagttcgaagaaccgcgtatcccgtatcgtgaaaccatcacgaaggctgcccgtgccgactaccgccataagaaacaatccggtggagcaggacagttcggtgaagtccacctgattgtagagccctattatgaaggcatgccgatgccggaaacctataagttcaacgggcaggaattcaagatgaacgtgaaaggcgttgaggaagttccgctggagtggggcggcaagctggtgtttgtcaacagtatcgtgggcggttctatcgatgcccgcttcatgccggctatcctgaaaggtatcatgtcccgtatggagcaaggtccgctcaccggttcgtatgcccgcgatgtgcgcgttatcgtatacgacggtaagatgcacccggtggattccaatgaaatttcctttatgctggccggtcgcaatgcgttcagcgaagcgttcaagaatgccggtcctaagattctggaaccgatatacgatgtggaagtgtttgttccttccgacaagatgggtgatgtgatgggtgacctgcaaggacgccgcgccatgattatgggtatgagtagcgaagccggttatgaaaagctgattgccaaagtgcctttgaaagagatgtcgtcctattctacggccctgagttcgttgacgggcgggcgcgcttcgttcattatgaagtttgccagctacgaacttgtaccgagcgacgtacaggataaacttatcaaggaatttgaagcaaagcaggctgacgaataaagtattttaataaatcgtgaaagccgttgttcgctcattgtgaggaataacggcttttctattaacactggttaagaatgaagggaaatgtgaatgctaatatttaattttttattaaatttgcaaaccaaaggtgtctcattttgttataatgctcgtaatacaacttaaaaaacacgctacggttaattaacgagaacacccggttaaatcaggttaatttgttaggagtgttaattagggagtgttaattttgtgactatgaaaaagtcgacaatatggatattaggcgtcgttatgggcctttccttcatcagtttgctgtatctgcagatcagctatattgaggaaatggtgaagatgcgtaacgagcaattcgatgaatcggtgaagcgtgctttgatggctgcttcaaaagatgtggagtctgcggaggtcgaccgctggttgcgggaggatatctccgaggctgagaagaaagcgtgggagcaaagctcacaaggtaagggagtggtgcagacgcagcgttttacggttacatcgccggacggtacaaggtattcggctatcgaactgaagacatttaccaacgaagcatcagaactgcccagggcaatgatttcgcgtaaacacggaacgaaaacgataccccagacatcgcgttcgctggcggatgccataaagaaccgttatctgtatcaacgcgccttgctggatgaggtggcctggcagatgatttaccgtgccagtagccggccgatagaagaacgggtgaattttaagaatctggaccagtatctgaaatcggggttgattgacaacggtatcgagttgaactatcactttaaggtgatagaccgggacggcagggaagtgtatcgctgttcggattacagcgatgaaggcagtgagagttcctactcgcagcccttgttcctgaacgacccgcctgcccgtatgagtatcgtcaagatacattttcccggcaagagggattatatcttcgattcggtcagctttatgattccatcgatgatattcacctttgtgctgttgataacgttcatcttcacgatttacatcgtgttccgccagaagaagctgacggagatgaagaatgactttatcaataatatgacgcacgaattcaagacgccgatttcaaccatttcgttggcggcgcagatgctgaaagacccggcggtaggcaaatctccggcaatgttccagcacatatcgggtgtcattaatgatgagacgaagcggttgaggttccaggtagagaaggttctccagatgtcgatgttcgaccggcagaaggcgacattgaaaatgaaggaattggataccaatgaactgattaccggcgtaatcaatacgtttgccttgaaagtggaacggtacaacgggaagattgagtcggacttgaaagcaaccgatccgataatctttgcagatgaaatgcacatcacgaatgtgattttcaatctcatggataatgcggtgaagtataaaagaccggatgtggacttgcagttgatggtgaagacctggaatgaaccgggtaaagtgatgatttcggtgcaagacaacggtataggtattaagaaagaaaacttgaaaaagatatttgataagttctatcgcgtgcatacaggtaatctgcacgatgttaaggggttcggactcggactggcttatgtaaggaagattattcaagaccataaggggaccatccgtgcggaaagcgaactgaatgttggaactaaatttattattgcattacctctattaaaaaattgattgatatggatgagaaactgcgtattttattgtgcgaagatgatgagaatcttggcatgcttttaagagaatatttacaggcaaaaggttacgctgccgagttatatcccgatggagaagcaggatacaaggctttcctgaagaataaatatgacctgtgtgtgtttgacgtgatgatgccgaagaaggatggctttactttggcacaggaggttcgcgcagcaaatgcggaaattcctattatcttcttgacggccaaaaccttgaaagaagatattctggaaggtttcaaaatcggtgcggacgattatatcaccaaaccgttcagtatggaagagctgactttcagaattgaagctatcttgagacgtgtccgtggcaagaagaacaaagaaagcagcatttacaagattggtaagtttacgtttgatacccagaaacagattttgtcaacgcctgaaaagcagaccaaactgactacaaaagaatccgaattgctgggcttgctttgtgcacacgccaacgaaatcctgcaacgtgactttgcattgaagactatctggattgacgataactacttcaatgcgcgtagtatggacgtatatatcaccaaattgcgtaagcacctgaaagaagatgaatctatcgagattatcaatattcacggaaagggatataaactgataactccggaagccgagtcctgatgggaatccggcttcggacaatggaaaataaaaaaaggcggttgcagtgcaatcgcctttttttatttctttttctcggtattaatccgcaattctcttgttgataagaatgtaagaaatcaatcctattacaattaaaacagcgctggtgcccagaatcgcgttgttgtttacattgccggtaaaagaacatgcaaccaggattacagctcctaccaagattaatatcaatcccagattttttaataagcctttcatgtgtgtgtattttaatagattattattttcgtattcttgtcacaaagaaaagcataattctttaacaagcgaaattatttttgcaaaaaaactattattcgcttaatttagttggttttcagctcttccctatggatttacggttagtctttcgtattgaaaaatatttttctcagcacttcctggctcacgctcagctcctcaatggtgatgccttgcaatgcttcctttaacgtctggttggctatgacgcgggcgcgctcttccagttcctttccgtctttagtaaggtgtatcagattggtgcggcggtcttttttatcggaaatgcgtactacaagatgctggcgctccatattatctataaggcgggtcatgctgggtttgtctttaaaggttgcattgcacaactcttgctgcgtaactccgtctttttcccataaaaagatgaggacagtccactgctccggagtgatttccaaaccattctgcctgaagttgcgtgataatttacggttaatcgcggcagataccttaccattcagaatagcgaatatcagctggatgtcaaagttaaattgctctatcatgaaattattgtttaaacaactttgcaaatatagtacaacttggatacaatacaaaataagtccgcttatttttgcagttcaaaataaaatgcctacctttgcacccgcatttaataaacaaataatttatttatttaattaaacgagtatgaatcaatacgaaaccgttttcattttgactcccgttttgtctgatgttcagatgaaggaagcggtagaaaaattcaaaggcatccttactgctgaaggtgctgagattgtaaatgaagaaaactggggactgaaaaagctggcttatcctatccagaagaagtcaaccggtttctatcagctgattgagttcaatgcagaacctactgtaattgagaaattggaaatcaacttccgtcgtgacgagcgcgtaatccgtttcttgactttcaagcaagacaagtacgctgcagagtacgctgcgaagagaagaagtgttaaatcaactaaaaaggaggattaatcatggcacaacaagttcaatcagaaatcagatatttaactccgccctcagtagacgttaagaagaaaaaatactgccgtttcaaaaagagcggtattaagtacatcgactacaaagaccctgaattcttgaagaaattcttgaatgagcaaggtaaaatccttccgcgtcgtattaccggtacttctttgaagttccaacgtcgtgtagctcaagctgtgaagagagcacgtcacttggcgttgctgccttatgtaactgacatgatgaaataataggaggaggaaagtatggaaattatattgaaagaagacatcgtaaacttgggttataagaacgacatcgtaaccgttaaatccggttatggtcgtaactacctcatcccgacaggaaaagctgtcatcgcttctccttctgcaaagaaaatgctggctgaagagctgaaacaacgcgctcacaagttggagaaaatcaaaaaggatgctgaagaactggctgctaagctggaaggcgtatccttgaagattgctactaaggttagtgctacaggtactatcttcggttctgtaggcaacatccagattgctgacgagctggctaaactgggtcacaacatcgaccgtaagattatcgttgttaaggatgcagtgaaagaagttggtaactacaaggctatcgttaagctgcacaaggaagtttctgtggaaattccttttgaagtagttgctgaggaagcataaatatagaattctatataaaaggaaaagtccggtttctgaaaagaagccggacttttttgattttctccctttcccggttatttatttgggatggagtgatgtttcatgataagacagatgtttaaatggcaagatgtcttcttgtgctgattggatataaaaaaagtctgtccgtactttcgtacgtcagactttcaattctctctaattgttgttctgaaattattcagctacaactgctgcgctatctgttgcagtagtatcagctactgatgctgctgcctcagctgctgcagcttctacagctgcgattgagtcagcgatacggattgaatcagctgttgcttgttcagcgttagctgctttgttaccacaagatgcgaaagatactgctacgatagctacggccatcaaaactaattttttcattttctttacttttaaaacgtaatacaatcaattgctttattaaaacgctgcaaaggtatgtactttttggatatgttgttctccaaaacccaactttttttatacttttttttgaggaaagcccattttgccctcttcaagcatgttctataacatattaatcctctgcaatgctgttgtataaataccttttgatacttcttttcggggttttctcaaattctgtaggataaagctgtatttggctgactttttcgtaagcggcaacgctgttgttcagattcttgagattttcatccatgatggtcttcaggttttccggattgttcaaccctaaagaatccagtgcttcatagtcggcatagaccaaagctaccaatttcctgttgcgctcaatcacaaggctttccaaaacgaacggcatattgttgaggcgggcttctatttcttccgggaaaatattttgtccgctggagctaagaatcatagttttgctgcgcccacggatataaaggttgttatgctcgtccaaagtacctaagtcgccggtacgtagccaaccgtcttcagtaaaaacctctttggtagcttccggatttttataatatccaaccattacattctcaccgcgtacctgtatttcgccaagtctgtcatccggattttctttatagatgcgggcttccataatatcaagtacccgtccggaagaagtggttacgaattcgttccagggagcgtagctgataagcggggcgcattccgtcatgccgtagccgatggtgaaaggaaatttgatgcgatggaagaattcttccacttccggattcatggcagcgccaccgataatcacttctttgaatcggccacctaacgcatctaccaatttcttccggatttgcccatatatctgtccgtccagcaaaggaatgctgagcgcccatttcatggactttttgttgataataggctggatgacgttcttgtatatcttttcgataacaagggggacggttataatcaggtttggctttacttcttcaaacgccttcatcaggattttgggagaaggaacttttcctaacagtgtgacatgtgtacccacggccgtagcggtcaggaagtcgaaagcgcaaccgtaagcgtgtgctagtggtagaaaagagagtactttatctcctttcttcagcagttcggtacgtataccgaaagttacgttacctgccagattgtttcctgtcagcatgacgcctttactgaagcctgttgtacccgaagtatagttcaacaacattattttgtcgttggagaggtcggtataagttacatcttcccgtgtgaaaccattcggataagtttcttccattttatcacccagatgtttgaggaaacgttggatagtctctccgtcacgctggtacaaacagcgaaaatcgttgagagagaacacaccgcgcaatccggtaagccgttcttcttccagatgctcccagatggcatcactggtgaagaggaatactgattcggaatgattgacgatgtgatgtacatcattggggttgaaatcctgcagaataggaaccacgatgccgccataggtgataaccgccatataagcgatgcaccaacgggcattattcttgccgataatcgctatcttatcgccgcggcgcaggctgcaatacttgaacagaaggtgtaatttggcaatttcctgcgctacttctccataggtataactttcgttttctccataatcggtgtaacagggaagatcccaattctcgcggaaactatgctcgtatagcttgataaagttttcttgtatcattgcacgttttttgatgaattgtgcaaaagtaggaaaaatataataataatgtgtacctttgtcgtgaaaatgtgatttagactcatgatagataccagtatatttcaagataagacagcggtttactatacgttggggtgtaaactgaatttctcggaaacttcgactatcggtaaggttttgcgggaggcaggcgtgcgtacggtgcgcaagggagagaaggcggatatatgtgtggtaaacacctgttcggtcaccgaagtggcggataagaagtgccgccaggcgattcatcgtttggtgaagcagcatccgggagcttttgtggtggtaacggggtgctatgcccagttgaagccggatgccgtagcaaagatagaaggtgtggatgtagtgctgggtgcggagcagaagaaagacctgcttcagtatttgggcgatttgcggaagcacgaaagcggtgaggcacatacctctgccttgaaagatatccgttcgtttgctccgtcgtgttcgcgtggtgatcgtacccgcttcttcctgaaagtgcaggacggttgcgattattactgttcttattgcaccattccttttgcccgcggccgcagtcgtaacggaagcatcgcatctttggtggaacaggctcgtcaggcagccgccgaaggcggtaaggagattgtattgacaggggtaaatatcggcgatttcggaaagtcgacgggagaaaccttcttcgacctggtaaaggcgttggacgatgtggaaggcattgagcgctatcgcatatcttctattgaacctaacttgctgacggacgaaatcattgagttcgtatcccgttccaagcggtttatgcctcatttccatattccgttgcaatcgggtagtgatgaagtgctgaaactgatgcgcagacgatatgatacggcgttgtttgcttctaaagtgaaacggataaaggaagtgatgcccgatgcctttatcggtgtggacgtgatcgtaggaacgcgtggagaaacggaagaatactttgagcaggcataccggtttattcaaagtctggatgtgacgcagcttcatgtgttcagctattccgaacgtccgggtacgcaggctttaaagatagagcatgtggtgtcttccgaggaaaagcacagacgcagccggcttctgctggatttgtcggacgaaaagacacgtgcgttttatgcccgccatatcgggcagacaatgcctgtgctgttggaacgttctaaaccgggaacgccgatgcacggtttcactccgaattacatccgggtggaagtgccgcatgatgatgcgctggataatcaggtaattccggtgcgtatgggcgattttaatgaagaaggcacggcgctttcgggagcgtttggcgataagtgatttactcagtaatctgtaataaggaattgacaaggtgaaatcaagattgatttattggttgacttatgcgggcatgtggttgttggccttattgccttttaaggtactttatatactgtccgacgggctttgctttttgatgcatcacgtcgtgcactatcggcgcagagtagtacgtgctaatttgtgcaatgcgtttcctgaaaaatccgcggctgaactgcgggatatagaacatgagttctaccgttatatctgtgattatatgttggaggaggtgaagatgctgcgtatgtctttcaaggaactctgccgacgcatggaatatgacaataaggaagagtatcttgccatgattgaaaaacatgggggtattgtgttgctgataccgcactatgctaactttgagtggattacgggaatgagcagtatcatgcaagagggagatataccggtgcaaatttataaaccgttgcataataaatatatggatgctatgtttaaacgcatccgtacccgttttggcggttacaatgtggccaaacattctacggcgcgcgagattataaaactgtgccgtgacaacaagcgtgtggcggtgggaatgataaccgaccagtcgcccaatcctaacgaggcgcattactggacaactttcctgaatcaggataccgtctttatggatggtgccgaacgtattgccaaacttatggactttcctgtattctactgtgaactgcaaaagcagggaaggggatattgccgggttcgttttgatctgataactgaaactccgaaggcgactgccgacggtgagataacggaatgttttgcccgtcgcctggaacagacaatccgtcgcgaaccgccctattggttctggtcgcataaacgttggaaactaaagcgtgaggataccatacaacatggataagattgctgttgtcatattgaactggaatgggtgtgaaatgcttcgttcgtttcttccttccgtagtgcgctattccaagacggaaggtgcgaaaatttatgtggcggataacggttcgacagatgcttccgttgatatgcttcgccaagagtttcctgacgtgcatcttattatattaaaagagaacctcggttttgccgaagggtacaaccttgccttgcagcaggtgtccgcagagtatgtggtgctgcttaattccgatgtggaagtgaccgaacactggttggtgccacttgtaagctacatggacgctcatcctgaagttgcggcatgccagcctaaaatccggagttggcggcaaaaggaactgttcgaatatgcaggagcggccggcggatttatagaccgttacggttatcccttttgccgggggcggataatgagtgcagtagagaaagacaacggacagtatgatactgtcgttcctgtgttttgggctacaggcgctgccttgtttatccgtcggaaagactatttggatgccggcggattggacggacgttttttcgctcatatggaagagatagacttgtgctggcgacttcgtgcccgcgggcggatgctggtttgtgtaccccaaagtaccgtttatcatgtaggcggtgcaaccttgaaaaaggagaatcctcataagacttttctcaatttccgtaacaatcttgtaatgctctataagaatctgccgcaagaagaattggggcctgtaatgcgtgtgcgcgcagtgcttgattatgttgcggctttgagttttctgctcaaagggcagtttcccaatatgtgggcagtgcttcgcgcacgtcatgcattccatttgctccgtccctcgtttgcggatgcccgtaaagagaacttgaaaaaaacatcactcccgatgattcccgaacgggtaaaaagtagtatcttggtagggttttatctgcgtgggaagaaatttttctctcagttgtagaaaccgttatctattcctgattgtttgttttgtaaaagttatttgcttatggaaaaattggttagaaagattggcctggtggcgcatgatgccatgaagaaagacctcatagagtgggtactttggaattcggaattgcttatggggcataagttttattgtacgggtactacgggaacccttattttggcggcattgaaagagaagcatcccgatgtcgaatgggattttaccattctcaaatccggtcctttgggcggtgaccagcaaatgggctcgcgcattgtggacggggaaattgattatcttttcttctttacagatcccatgactttgcagccgcacgataccgatgttaaggctttgacccgtcttgccagcgtggagaacatcgtgttttgctgtaaccgcagtacggcagaccatatcatttcgagtccgctcttccttgatccgacttatgaacgtactgttcccgattatagtaactatgccaagaggttcgagaacaagcaagtcgttgccgaggcggttgaatcggctaagaaaagaaagaagaagcaataattcattctgtgcatataatgaggcggggatgtccgaagtgcctgtacagggttgcttttgttttaagtagctattgctgtcgcttcccgtgagatgcaaatctctattcccgccgcttcgatgtctgcccccattggcggattgcgctttgataactttaattcaatattttctatttggggaaagtcgccgaacaaccgtttcacaatacgtcctccgacatgttccaatagcttggaaggaacttccatttctgcctttacggcttcatacacatctgcatagctcacggtgtccgccacatcatcggtctgcatggcaggtgcgatgtttacttgcagtcgcaggctgacggtgaattcgttacctgccagtgtttcctgttcgcctacaccgtggtgggcgaaaaagcatatccggtctaaaaatatgtagcttttcataaatgaaaaaatagtctctcatgcaaacttatggataatatttttgttctacaactcgtggagcacgatttctatgcttttttgcaaaaaatggcgtgaaaattttcattctaattatatttctataactttgcattgaagttcggtagcgactgtagcttgattttttaaggagaaaaatatattagaagcgttgtgctttgtcctctaaatggaaacctaggaaattttcattatttaacgaaggacagcacagtggattctcacgtttgtagcgtgggactgctgtctgttttcgttaaagggctattcctagggcctccatttagaaacagcacgcagctccacgtttctgtttctaaccggtcctttcggagtttggaggacgcatgcttccggtctgcctgtgcagacagaagtttataagacgtttatgcagataagattgttgctgtttctgttgtgcatatttctcatgactccgattgatgggtatgtaaaagccggtaatggggaagataccttgtactacgccgggcgaacattcagtccgaattcgagcatcgggcgcaataaccattcgttgttgctgaagaccaatgctgtggcgtggggaatggcggttatgaacgtagcggtggagtatgatatttcgcctgcaatttctgtccttattcctttttactattctcctttcaattattttatttcttcccgcaaactgcgcactttctgcgtgcagcccgaagtgcgttattggttcgggcaggtggatggtctttttaccggtgtgcatatcggggtggcttcttacaactatgctcttaagaacagtacatatcgctatcagaatagcgatacgggtactccattgctgaacatggggcttactgccggttaccggctttcactcggaaaaggcgggtgctggtgtctggagttttctttgggagcgggatatgcttatctggattatgaccgctttttcaatattcccggtggtgcttatgtcgatactcgtcataagaattttttcggcatcgaccatgcgggtatttcagtgggctaccgtattgattggaaaggaggccggcgatgaaacaactgtttgtggctgtctgtagcttgctgtctgcactcttgtggggaggatgcagcgtacacgaattgccggaaggcgatgggatagaccctacaaccgtacataccgaaattgtcctgctacccggttccgatatgacacagttcgatattcctgaattctctacccgtaccgccggtgtgcacaagtacaaggtgcgttatattgtggaagtatatgccgatgacaggttcgaccaaagcctgcaattccgccgtcagttgatttgtgaggaaggagatgcaggagaagtggcattggaatgtgaacttcatgcacgtaactatcggatggtggcatggcgggactttgtacttgctgccgaggtttccgacaacactgctgccgactgtttttacaccacttccgattttgctgccgtcaagctgaaaggtgattatacgggcggaaccgactataaagatgtgttttgcgggcaggcaaccctcgaccttattccttatcgttgccatttggcagcccgtcatcgcgaagagatacaattggaacgtccgctggcgaaaatagagttgattactaccgatgtcatcaagtacctcaacaagttggaacaaatgaagtctgtccgtcctgcaggcatagaagattttacggtgcaactgggttacaccggttatttccccacaggttttaatgtcgtttccaaccgtcccaatgaggcggtcacaggtatacaatttacttccgttcccattgttatttccaacaatgaggcttgtctggctttcgactatgtgctggtgaatggtacggagtcttccgttacgctggaaatggttatctgcaacgaaaagggacaggaggtgaaccgggtcggcggcgtggaagtgcccgtcagacggaataggattactacggtgcgtgatgcgtttcttacccgtgagttcgctcccggcatcggtatcaaccccggtttcgatggagagataaatgtggtggttccctgacggcttatttaaacatgacttattcaaacagaataaacagatgtctcattttaaacaaaacgaacatgaaaaagtgttttttattaatggcaggtattatcctgcttgtattcgcagcctgtcagagtgacgagctggcgaatggcggaagaaacggcgaagtagccgcctctttcagtgtacagttgcctgggaacgggaacaatgctgtaacccgtgctgcaacggcgggtgacggtacatcggtgaaccgttgtatcatggaaatctacctgaacgacgaactttatagccggcagataggtgcgattcaaccggatggtctgacggccggctttgatgtccgcctggttacttcacagacttataagttcgtattttgggcagaccacgtcgagtcagtggaaggtgatgccataaagaccgatttgcattacaacactgccgaccttcgtaacatttccatgcaaggggattataacggaagcggtaaggacgatacgcgggatgctttctttgccagtctggagaagctggtgactaatgctttttctgaaagtgtggaactgacccgcccgttcggacaattgaacatcaaaacggaagatttggcttctattcctgacaatcaaaaagaagaatttgttccggtaacggcgggcttgtcattcaagaacctttataccggttttaatgctgccacgggtgacttgctcggcgaactgacggctgtagcttacaaagcggcttcggctgtggcggatgccaacggtaacctgactgtggactatctctttgcaccgaatactgtgggcggacaacatctggtaaatatgacgcttgccgtatacaacgctgccggtggacagattaccacgaaagccctgaataacatacctgttcagcgtaactacaagacgaatgtaacgggtaatttactgacggttgacggtaaggtaaacgtaatggttactcctgcattctcttctcctgctttaagtgaaaaagtaatagaggtagcatccgtaaacgaagtggctgaagccttgaaaaccaatactaatgtggttgtaatggaagcaccgaaagaagcagccactatttcactgcccaaatatgagagcggagatgttgcggtatccataacattgcctgaaacatcgaatgacataaccattaattatgcgacagaaaccggaggggatagtaaaaatgctcctaaggaactgaatataacggctccttccatcagtaagataatcattgacgcttcggaatctaccgtaacgttgaacggacagtcttatacggctgttgaggctactacagcggataatacgctgattgtggggaaagatgttacagttgcagatttgaccgttaagaaaggcaatgtggaaatttatggaacggtaaacaatatcagctttacagacaacggcggttatgttactgtttgcagcgtttccactgccgcacagcttaaggtggccggtgctttggtaacccaaaagaagtgccggaaaattgtattaactgccgatatagacctcaacggaagcagtgaaaatctttgggaaccgatgaatgcagaatacaatgcactcaaaaacggagaaaccaaccttgaagagtttgacggtggtaaccatactatctgcaatctttatgttgacaatgttacgaataaaacgaataccaaaggaaattattatggcggtctgttttatgtactcaacggtacggtgaaagatcttactattgatggggcaacagtaacttgtttccgtggtgcagcattaataggacgattggacgccggattggtggaaaactgccacgtgaagaatgccaggatatatagtgagcaaaaggccggcgggctggcgggttatgtaaacaacagcagccaagatttgattatccgcggatgttctgcatcggatataacactcgataaactttcaagtatggatgaagcctatatgatgggaggttttatcggttatttgcaatcttacgaacggaatacgctcatcgaaaataatagtgtaagcaatattgccataaattatatatatacttctcctgatgaggttacggataaggttgctgatatggagcagacctattgccatgcatttatcggaaatgtgataaacacttctaagaaagacgaatcatacaataagtatagcgttgttttgaagaacaatcgagtggataaacagcttgaaaatgccgtaacttgtgaccgtaccaataattatataggttggtgggcaggtgactacaatcttaatggaaataatgtctcttactccactaaattggtgattgacggtgagattatggaccgttggatagaggtgaagcgtgtggcaaacctgctcagaaccgggggggatatttccatttatcgctatgtagacctgacaaagaacaatgaatcaagtcaggaaataaatattactgcggaaacggtgttgacattggagaagaatgccgtactcattgtaggaaaacaacaagtcaataataagagtaaacttacagtaaaaggtgcaggtgccatgaaagctaccgattacctgcttatgaatgaaaccggagccgaattgattattgaaggcggcattttcactgctacatcagctacggatgccaacggagtggctgtttataatcagggaaaatgcactgtcaattccggagtctttgatgctcccggatttacactgatgaataccggcaatgcagatatgacagttaccggcggtactgtaaaatgtggtggtataaaaacgggatatgcgttaatggcggcaggttctgctgccaagcttaccgtaagtggcggtgatatagaggctatacagtctatcggtggtgctcaagtaaatatttcgggtggttcggtgtattgtgaggggacatattatgccttgtataacggaggcggcaatacttcgatttccggtggttacttttatagtccgacaggaaagaatatttatgtagcaagcggaaccgtaaaaactaccggtggctactttagtgataagtccgctcctttggaaagcggttataaatttcaggatgttagtgtaaccgcgaatggaaatcagtataactatcaggtagtgtctgaataataaatatctaaataagattggtatgaaaaagtgttttttacttaggatagtatttttcgctgactattaacagtacaagatactgatccccccccttttatgggacatggaacttgtctctttcgcaagaggagatgatgcaactgttgctttccggattacggaagtgttctgcggttcggagagcatacggtttttttgtttgtttgccttccctgcgttgcgaaacgtggggaagtttttgtatgatttagtcagttgtttggcatcacaggtctgtttattaagcagaggtatagcagaaaattctatgtaaggagatgcaatgagtaaaaaagcggtggaaactattaaaaggtctccaccgcttttttactcattatcagttaatatgctgtttatcgtcccgtttgtgcgataagctcttttatcttttcgttcaggctttcggctttcatcagttgttccagcgtcaggtgcatacgccagcgccagtagtggcgcggattggcaggtacattgatgcgttcttcctgcgcattggggttgcgccatttgccgtccatcgacatccagtcctgcagggagaggatggcaagtatggaattgctttgcaggtgcttgcgtacaacctcttcgcaaagttcgggcgtggcaacggcgggagcggcaccgtaatgtccgagcatcgtgttgtagtaacgttgtgtctgctggaagtcttcttcccaccagccgcgcaaggtggacatatcgtgtgtggatatggtgcagacagagcgatacggataccagtccggatgcccgaactcctgtgccgggtctttgggcatgcgttgtatttccagggacagaatgcgtaaatcgttcattacccatgccacgcaaccgggaatcatgcccaagtcttcaccgcataccagcatccgggtagattgcgtcagttgcggcagtttgttcatagcctgctcacgccagaattcgttgtggcggtgatagtagtactggtcgtacagacggttgaaggcagccttttcccaatcgttcagggaacggtagatatagtcgtgctgcacaccgatacgcgggtggtatttgtacgggtcattgcggtcgggcacaaacagcacgtcgctgataagcgcatacaggccgtcgcgtatccagatactgtcctcatccgttttgccggcaaagtaggcctctaccttgcgttgggtatcgaattcgggacgcatccggtaaatttcccacgtatctgtcggttcgatgaacgtctgctttacgtaatcggtatgcgggccgaacatctgtccgaggaagtactcgtgtatgtaaggtttcaggaactcatcgcggaaagagagaccgtaactctctatctcctcacgcgtcatgggcagggcgggcacgaactgtcccagcagaccgtgcacggcgtgcatcggaatttcccagattcggaagaaaccgaggatatggtcgatgcggtaggcatcgaagtattccgccattttgcggaaacgcttcatccaccacgcatagccgtccttttccatgacatcccagttgtaggtggggaatccccagttctgtccgtttacagagaaatcatcgggcggtgcgccggcttgtccgttcaggttgaaatagtggggttctgtccatgcttctacactgttgcggctgatgccgatgggtatgtcacctttcagcacaacaccattggcgcgtgcatgttcggtagctgcaagcagttgcagatgcaggttgaactggatataaaaatagatggctatatgcgggtaatcggctgatgccggttggcagagcttcttaatctctgcggcatcgtagctgctgtatttaggccactcgcggaagttgggcgttttataaacatcgcgcaggtaactgaaaacggcgtacggttgcagccactctttgtttgattcaaaaaaatcgtggaaagctgccgagctcaatactttttctccttcttgcttgaagataagatgaaaatattcccacttggttttgttgacggcttcgtaatcgacggcgggcagggcattcagttctttctgccgtttgttgaagtctgccatggcttttttgtccttcaatgttcccagttgcttcaagtcggtgtacatcggatggaaagcatagatggagatgctgttgtaaggataggaatccgtccatgtatgcgtcatggtagtgtcgttgatgggttgaatctgtacggctttctgtttggtgcttaccgcccagtcaatcatacgcttcaagtcgccgaagtcgcccacaccaaagctcttttcggagcggagtgagaatacgggcacggcaacacctgcgcccttccaggcgggaaggctgaaatatacgtagcggtcgccgacaacaagggtttcgttggcgcctgtttgcgggtctgccatatatcggttcggattgttttcccagcaaacggcacggcgttctttcttgttatatagaatgaatttatattccagcgggaagctgattttggtggcatccacctctatctgccactccgggaagttggcatcactcataagcacggctttgtccgggttccactctccgaatataggctggtttccgcagatgcccaggcaatggtcactgtctatgcagggtgcgtatgcctttatcagcagccctttcttgtgtcctttgggtgcggcgttgcgttcgcggtgtgccagaagagattccgtaaaggcggaagtatagaaatactgctgctccggcaggtttttccagcaatcctgtatccggtacgttttcttggaagttccggaaaggtaaagcgtacggggcaggctgttccactctgcacgtgtatgccgaccgtcgcggaagatatggtagctgtatcggacaagtccgtcttccggcattgcaatgtttacttccgcagtccagtgaataccgtctatggtctgtagcggcaaagctttgtcgggatgttcgtttccgagttcggggatggagcctgaaactctgacttcttcaccccaattggttctgtactcgatattgaataataaaatcatatatattagatttagaaacaacaatagctgcaatgattatgcaagtatagaaaatattcctcataatcatgcagctattgccggctatctcatttaaattcctatgcaaacgtttgtgcttgcctgaaccttatccgcaacgggatgtaccgcaggtggtgcagataaggcagccttcctgataaaccagtgtctcgttaccgcaattcgggcatttctgacctttggctgcggtgccgtccgtaacgtatttcttcaaggcacgttccacaccgtttttccaggtattgatgttctcgctgtccaattgcagtgagcttaccagcttcattacctgctcgataggcatgcggtaacgcagtacgccggagatgagtttggcatagttccagtattctttgttgaacttctcggacagtccctcgatggttaccttgtagccgcgcttgttctcgaactggaagtcgtaacgcttgttgccgttttcatcaacgttcttgatgatgtgtcctgttgaaacgttcttcggaaggatgattccttcatcgtcgtcctgaagaccggtaaatatttcataaggatatccgtcgagcaaaccgacgaatgccacccatttctccttattgttctggaagcgtacgacgtctgcttcaagcactttcgggcgggtttcgacaaccgtaggcggtttgcacggaggcaactcctcttttttgtcttttttggtggagataagcacgcccgaacgtgagccgtcgcggtataccgtacagcctttgcatcccgatttccacgcttctacatagagacggttcaccagttcctcgtctacatcgttcggcaggttgatggtaacgctgatggagtggtctacccatttctggatacgtccctgcatctttactttcatcagccagtccacatcattggaagttgctttataataaggtgacttctgtaccagtgcatctacctcgtcctgggtgtagtgcttggcaggatcgtatccttgcgcctgcatccaggtgacgaacttgggatggaatacgatgtattcctcgaatgcgtctccggtttcatccacgaaatccacatgtacgttggcgtcattcggattgactttgcgacgtcgcttgtataccggtaggaatacgggttcgataccagaagtggtttgcgtcatcaggcttgtcgtgcctgtcggtgcgatggtgagacaggcaatgttgcggcggccgtatttcttcatttcctcgtacagttccgggtctgcttcgcgcaggcggttgatgaacgggttgttcttttcgcgttcgctgtcgtatacttcgaaagcgccgcgttctttagccatttccacagaagagcggtatgcactcagtgctacggtctggtgtactttctctgcaaattcggtagcctcttcagtgccgtaacgcagtcccaatgctgcaagcatgtcgccttcggcggtgatgcctacgccggtgcggcggccttgtccgctctttttgtagattttctgccacaaaacgctttcggtatgctttacatcttcgttttccggatcggagtcaattttggccatgatacgttctatcttctcaagttccaggtcgatgatgtcgtccatgatgcgctgggcgagtgctacgtgcttcttgaacaagtcgaaatcgaagtaggcatccggtttgaacggattgactacatatgaatataggttaatggccagcaaacggcaggagtcgtaggggcacaaggggatttcaccgcaagggttggtcgacacggtacggtaacccaggtctgcgtagcaatcgggtacggactctcttaatatggtgtcccagaagagtacgccgggctcggcggacttccatgcgttgtgcacgatttttttccacaaatcggtggcgctgatttctttcttgaacagaggttcgtccgcgtcaatgggatattgctgtacgaatggcttgccgtcgatggctgcctgcataaatgcgtcggtcagcttgacggatacattggcccccgtaactttaccttctgtcatttttgcatctataaaggcttccgaatccggatgcttgatggatacgcttaacatcagcgcaccccggcggccgtcttgggctacttcacgggtggagttggagtagcgttccatgaagggaaccaatccggttgatgtcagggcggagttttttaccggagaacctttcgggcggatgtgtgacaagtcgtgtcctacaccgccgcggcgtttcatcagttgtacctgctcttcatcaatcttgaagattgcaccgtatgagtcggcctcgccatccacacctatcacaaaacagttggaaagggaagctacctggtagttgtttccgattccggtcatcgggctgccttgcggaacgatgtatttgaagtggtccaacaagccgaagagttcttcggaagtcagtgcgttggggtacttggcttcgatgcgggctacttcattggctattctccaatgcatgtcttccggagatttttcgtaaatatttccgaaagaatctttgactgcgtatttgttcacccaaacccttgcagccagttcgtcgcctcggaagtatcgtaaagattcttcgtaggcttcgtcataagaataaactttcttttccacgatgcgataactcttagatttaattatgaataagtaaaagtgtagaagttgtacttattgctaacaaatgtggctgcaaatctatgaatgttttttgttatggcaaaataaaaattgatgtttttattaaccggttgttagttttcagttttaatcggttaatttgttggtttataataaaatggctttttgtaaattaacaaaaagttttctaaaaagaaaattccataacgaatactgttcgggtagtttgtcctttttagaaaacatgcctgcacatattcggaactattggatgatattctgtgtttcttttcatatatttgcagaaaaaagaaagaatggaaagtctaaaacaaaggagaacaatccgtaagtatcagcagaaagatatttcttctgatttgttaaatgatttgcttgaaacctctttccgtgcttctacggttggaaacatgcaggtgtatagcgtaattgtaacccgtgacgctgaccggaaagccaggttggcaccggcgcatttcaatcagcctatggtgaagacggcgccggcagttcttactttttgcatcgacttgcgccgttttagcaaatggtgcgagcagcggaaggcagagccgggatataacaattttgaatggtttgttaccggagctgtggatgctttgttggttgcgcaaacattctgtgtggcagccgaagaaaaaggtttgggcatctgctatctgggtactaccacctacaacccccaaatgattattgaggcattggagttgcccgaattggtcttccctatcactaccgttaccgtaggctggccggcagagactcctgcacaagtagaccgcctgcctttggaggccattgtccatgaagaaacttatcatgattatactcctgaggatattgaccgtctgtatgcctataaggagtctttgcctgagaataaacagtttatcgcagaaaataataaagagacattggctcaggtctttacggatgtacgctatacaaagaaagacagcgaggctatgtccgagaacctttggaaagtaatgaaacaacagggattttaatttgagtataacgtatgaggtataaagcgtatccatgcagtttgcatgatgactttatacctcataccttatacttttgttccgtaccttatacttttttcaaggcggtctgaatttcttcgatttcagcgcggaatgatttgtccacctctttcagttgcttgattgttttgcaggcatgcagtacggtggcatggtctttatttccgattagcgtacctatcttggctgtagagaagtctgtatgttttttggctaaatacatggctatctgacgggcttgcaccacttcgcgtttacgcgattttgtatgtatggcggcattttccaaaccaaagtgtttgcatacggtggtgatgatgtcgtcaatggttatggctttgctttcgcagttcacgactttgcgtacgatgcgttgtgccaactccaggtcgatttccttgttgtatatcgtagaatgggccataatggagatgacaatgccttccaggtcgcgcacgctgttacctacattctctgctatataatcaattacttccggcgggaattgtaaaccgtcacgatgtatcttattgcgcaggatatttttgcgcaattctaccgtgggcttttccagttccgccaccattccccatttgaaacgtgtaatcaagcgttcttccataccttgaagcagtacgggagcccggtctgaagtgagaataagctgtttgccgttttgatgcagatggttgaagatatggaagaatgtgttctgcgttttggtaacgcctgcaaattcctgaatatcgtcaataatcaatatgtcaatagtctggtagaagttgatgaaatcgttggtcgtattgttacgtacagagtcggtgtattgtacttggaataaatgcgcagatacgtacaatacgcgtttctccggatataattccttgatttttgtaccgatggcattggcaaggtgagtttttcccacacctgatgctccatacaaaaacagcggattgaatatggtcttagccggattgagcgccactgcttctgcaacactacgagagagtttattgctatatccttcaatgaacgtgtcgaaattgtattccggattcagatgcggatccaaatcgggaacaggtatctgtggaatagctttatctatcgtttgcttttgtggcataatagtacggtgggtcgactcgtagttgacggtcttttcaggccgtgaacttttgtccaccataacattatacatcaactttgttccctctccgattaccttatagagggtcttacgcaacaagtctacaaatttatcctccagaaattcgtaaaagaactggctgggaacttgtacaacgagcgttttatcctcatattttaagggaacgatggggagaaaccaagttttatatgtctgttccggaacattgtctctgatgatttcaagacagcggttccacaatccgacatgatcctgtccactcataacggttactaatacatttattaattaagcaaaacttctacgtttgcaaaattggcaatcttatttgaaaaaaacaaatctctcttttcttgcatttctcaggaaaacaataatctctttactttcagctacttatcgggatgtatgaaacctatgcctttgctggaagtcttgcttttatgtaacagcttgtaatgtagtgtattatagcctatacacaagttgctgcatccattggaaacagcatgagtataaacctcttttttacctttatacgcagacttatcaaggggtttctttcccaataacaaatgagccttcttatttagacaaaatctatttaagaggaatttctacttatctttcttgccgaacaaagagaaatggacgtagcgtttcggatgcgatttcaagtcttccaacaagctcgctgcgtttgccgtggtggcattcagattgttgtaaagcgacgggtcgtttagcaacaatcctactgtattgtccttacggtttaatttgtctgtaagcatcttcacgttggccagcgttgagtctatgctttgcatggctgttgcatagtctatctctttcaggttgttggaaatcagaacaaagttatctccgatggtgttcagctttcctgtgagctgcgggatgtctttattcatcaatgtttgcagttgcccgctggttacggccaggttggcggtcaggttctgcacattgtgcagggtggcaggtatggcggggtctgccaataccgtatttaaagagccgaggatagaatccagtttgggcagcatcttttccagttgcggcatcatggtagccactttctccatcattccgttgttgagggtgccgggaatcgtatctccgacctgatacttctcgcggggattgttggcaagaagaagattcatcttgacgccgcctaacatttctgtagccagttccgccgtactgcctttgggaatgcggaggtcggtgttgacatctatttcggcaaccacttttccgggttgggtataatcgtaatacaggtcgcgtacgatacctacgcggaaaccgtcggcaaagaccggacttgatttggtgagtccgttgacattatggaacttgacatagaaataactggaaggcttgaacatgtgaatgcctttcagatagttgataccatatactaatatgcaaagcgctgctatgcctgcgattccaattctgacttctttggtaatatacttcatgatgtattttatttatttcttttgtttttaaattctctgatggcagtatttacgtttactttcctgccgtttttaaaggctatgatgaaagcatccttgaattttgccgtaattgaacgtttggtgcgcaacaccttattataatcggaagatgcgccataggtgtatttgtacaggccgccttccttataataatccacatctttcaatcctttcagccgcttgtcgttcttggccagcggacgggaagaggtgagtatctgtatcttgaacacaggggctttgtcctctgtctgcgcaacggttgctttttccgaaggctggggggccggtttgttgttccgggcggtcgcttttttctctgtttcgggtgtggcatcggcaggagcggacgttttctcttccggctgtggcaggtcttccggcagaatggtctggctgcttccgttcaaccggatttcctgttcccgtttataagtaaggaaagcacggaaaataccgtcggcaagggtgccggttcctgcatccgtgtttagataacgttcttcttcgggtgtggagataaagccgagttcgaccagaatactgggcatggcactggctttcaataccagaaaaccggcctggtgcacgccccggtctacccgccggcaggtgttgcggaaatgcttttgtacaagtgatgccaggtgcacgctttgcgacatatatttatcctgcatgaactcgaagataatgtaggactcggcggaattgggattaaatcctgcatagcgggtcttatagtcgctttcgtaaagaatgaccgagttttcccgtttggcaacttcaaggttggcatccgatttggcaagacctaacgtccaggtggatgcgcctttggcagtccggttattggcaagcgcattggtgtggatcgagataaataggtctgctttgacatcgttggctatttccgcgcgtcggtttagaggaataaagacatcccgcgtacgggtatatacgacttttacatccgggcagttcttttgtatctgcttgccgagtttgagtgcgacattcaggtttatgttcttttctttggagattctgccgatggcgccggggtcgtgtccgccgtgtccggcgtcgataacgacaacaaaatccttcgccccgatattgctgcaacaaaaaggcgcaatgagcagtcccaggcaaaggcttatatataagatatgttgtctgtatcgtttcatattaaaatatcgttgcaaagatagcgcaaaggtctattatcgccctgcaaaagtaatgtaattttatagaaaactcacactttactttcaagttttattcgtaacagcttctttttagggagatttagtctttgcatttgcaaaatttacatgttttctatacttgcttctgtttggcggttggctgtgcataattcgttagacccgggtcatccgttcgttagacctaggttgaacgaacggatgacccgggtctaacgaaagggcgacgactgtctaacgaattaaaaatactatgttctgtgtcaatgcttctcttttttcccttttattttctgcgatgagcctatttgttgataatatctgtaactttgcgcacaaatattaattggtagatacaggtatgcttcttcgtcttataaagaattggacattgcctttggcgatgcttgccggtacggccggatatttcttctttgcgaaaatttcctggtttgcaccggtgaaaccttgtttgaacgggttggtggctctcctgactccggctttgatttttgcacaattgctgttaaccttttgtaaggtagaagtgcatgatttgaaaccgaaagggtggcatggctggctgttgctgtttcagacggtggcgtgtctggttgtggcggctttgctggtgtgctgtccgatggaggagatgtatcgggaagtttttgaaggggctatggtatgccttatttgtcctacggctactgctgctgcggtcattaccggtaagctgggcggaagtgcgtcgagtcttaccacgtatacgttgttgtccaatcttttggctgcggtggttgttccgttggtatttccttgggttgagcctcatgcggatgttactttttttgcagctttcttgaaaatactgagtaaggtgtttccgctgttgcttctgcctttcttcatggcttggtttctgcgggtgtttgtcaagaatgtgcatagatgcttattggagttccacgatgctgctttctacttatgggcggtggcgcttgccattgtgtcggggcagacggtgcgttcgttggcgaacagtgatgctccggtgtttgtggaagtcctgattgctttagcaggtttggcagcctgctgtgtccaattctatttaggcaagagaatcggcgggcattacaatgaccgtatcagtggcggacaggcgctgggacagaagaatacggtgcttgccatttggatgtcctatacttatttgaatccgctctcttccgtagggccgggttcgtatgtgctgtggcaaaatatttttaacagttatcagttgtggcggaagcggaaaagtgagcaaccgcctctttagccatacggaaattagtgggcaatagtaatttattcgtcatatcccaacttcttctcattgtaatccgatgcgatataagcagggcgtcttttggtctctttgaaaatacgtccgatatactctccgataacgcccaatgagaacagttggatgccgcctaggaacagaataacgactatcagggtggggaaaccggcggcctggtcgccgtatataatggtctttatcaggaaatagatagcgtagataaagctggaaatggaacagaggataccgcaaacggtggcaatgcgcaggggagcggtggaagaggaggtgattccttcgattgccaggttcagcagtttgaagaaactccatgaggagtgtccggcaaggcggtcgccccggtcgaattctatgcttttcttccggtagcctatccagcagaatagtcctttggtatagcgttcctgttcgcgcaagtgtcttaacgccagtacgcagcggcggtcgagcaggcggaagtctcctacgttcggcagaatatctatccggctcatcttttgtaagatgctgtagaaggcaagtgacagccggcggcgcatccagctctcttcgccacggttgcggcgtttggcgtagatgtcgtcataaccttcttcccagtattgcagcatccggtctacaagttcgggagggtcttgcaggtcagcatccattaccacgcagcagtctccggtggtgtagtcgaagcctgcaagcatggcgatttccttgccgaagttgcgcgagaggttcacgaaatttaccctgctgtccgtttgtcggagttggcggataacatcgagcgtccggtcgctgctgccgtcattgataaataggatttcccatgcataagtgccgttgcggttgataagttctatcaagcgctgatatagggtagggagcatcgcttcttcgttgtagaccggaatcagtagggttactttcttcatttcgcaagtgtgtatggtaaatactttgcaaatatattattttccggagaagtccgggataaatattataattaaaaattattgatttgagaaatatcagtcttttcgtttgaaaacgaagcgtaccaacaggaaattgaccggaatggctatggcgaataccggaataggggcaagggttttggagagtcccaaccagaggaatgtattcagcaaaccgatgtgcagcaggtaattgaataaatgtgctccgccaaaaccgaacgccttgctccatgacggctttttgccgaacgtgaaatatgcggtaaggtagaaattggcgataaagctcagggcatagccgagggtataggctatatttacattgatgaaccgttgcagtaagaagtatatcccgtagtgcaaagcggttgcaaggatacccactataacaaaacgtatgaactcgggaaatctttttaaatgcttcattttaggtttacgctatcattgagccggcaaagttaggtattgttgtagaatatttcgtacttttgcagccggaaaaatataaaaacgaaaatatatgtcggacagaaagatagcgttctggtttattgcactgttaagtgtacttgtactggttccctttttaggggaaaccatattctattcgaaaggagaaccgcgtgaggcgatagttgcatataccatgctggaaagcggtaactggatactcccgacgaattacggagtggaaatagcttataaaccgcctttcctttattggacaatagccgtcatttcatctgtcttgggaggagttacggagttctcggcacgtatgccgtcggcgcttgcttttctggctatgcagttggtattcttcagcttcgtagccaaacgcaaggatgtaaagacggcatttctgacctctatccttcttttgtcctcttttgaagtacaccgtgcggcggtagcttgccggcttgatatgctgcaagtttctctcatcgtgatttcattgtgtctgcttttccgatgggatgagaagaattgcaaaggaattccttggttggccgtactgttgatggcatgcgctacattgacaaaagggccggtcggctctatctttccctgtctgggtatcggggtgtatcagctgttgcgcgggcgttcgttcggaaaggctttcttttcattgctgggcatcgggttgctgtccctcattcctttgggcatttggttttgggcagcttatcagcaaggcggagaggcgtttgtcaatttgatgctggaagaaaataccggacgtttcttccggaaaatgtcctatgcatcgcacgagaatccgttgtggtataacttcctgactattatttggggatgggttccctggactttagtgctgcttatttccttgttcggactgaaatggaaaaagatacatcttctgccggaaggtgcttccgttggcgaacgtttaaagaaagcgtggtgcaaattccgttctcagtcaccgttgcagctttttgcgtgggtggtgattttaacgattttcatcttctattgcattcccaaaagtaagcgtagcgtctatctgctgcctatctatccgtttatgggaatgctgcttgccgaatacctgctggcattggtgcaacgaggcgcgaaagtattccggatttctgcctggattttcgttgcattgacaatattgcttaccgttactttctttgccgtgcgtttggacatgattcccgaaagtatttggggaacaggcaagcatgccgccgagaatatagcttttgtgaatgcactgcatacggtggagctctcactgccgaaatggctgattgtgttcctgccgcttgtagctgccggctgtttgctgtatatgctggtaaagcgtgcggacacgcgttcgctgttgtatggtacggctggctgcattttgtgtatatttgtgtcgttggacggcgtttatcagcctactatattggcggtgaagtcggacaggcatctggctgtacgcctgaacgagttagaacctcaaggtatggtctattcgtatgccgactgggttaagttctatggcataaattattatctgggcgaccgggtgcgtatctttgataaactgaaccctgcccaaggttatgtgttggtgacggacgaactgcaagaacagttcctgcaggatacggaagacacctaccgggtggaggaagtataccgcactcctctgcgcagttgcgatttgcgccggaaagtcattgtttataaattcagcaaaaaataaaaatgagtccccaagggttgattgataaatattatccggaagccaatgaattgaggcatatcctactgacgcacagccgttctgtggccgataaggctttgtggattgccgaccgccatccggagttgtctttggacagagattttctgtatgaagcggctatgttgcacgatataggtatattcctgacagatgccgatggcatttattgctttggcgacaaaccctatatctgtcatggctatttgggagcggacctggtgcgttcggaaggatatccgcgtcatgccttggtttgtgaaaggcatacgggggccggtctcgcactggaggatattattgcgcaaaatctgcctgttcctcaccgggacatgcttccggtaagtatggaagagcaggttgtatgttttgcagataagttttattccaagacacatctggacagggaaaaaagtgtagagaaagcgcgtaacagcctgctgcgttatggcaaagccggcgtgcaacgctttgattattggtgtaaactgtttttgtagcaatctaaatttctttaaaaagggagattatccgtataaattacgtacttttgcccgttcaagcgtaaactattagttaatgacgccattgaaagcaaatacattcatatcattcatactactattcgtcttacttcttctttccggtgaggctgcttcgcaacgtcgtcggcgcggtgttgtaccaccaggaagacagcaagtggactctttgcggagtgattcgctggggcaggggattgcatcttctcataggagaggtatgcgcgataccttgcaacccgattctttgcggatggatacgttggctgcttccggcaagaagaaacagcctttggacgctccggtgacttatgaggcaaacgattccattgtatttactcaaggcggatatgcgcatctctatggtcagggaaaagtaaactatcagcagatagaattggcggcggatgttattaccatgaatatggatagtagcacggtttatgcccatggagtggaggattcgttgggcgtgaagaagggaacaccggttttcaaggatggagaaaccccatacgagactaatacgattcgctataacttcaagagtaagaagggtattataagtaatgtagtcagccagcagggcgaaggatatgtaaccggaaacaatgcaaaaaaaggcgctaatgacgagctgtatatgaagagtggccgatacacgacctgcgaccaccatgagcacccccacttctatatgcagatgacttacgcaaaagtgcgccccaaaaagaatgtagtgaccggacctgcctatctggtggtggaggatgtgcctttgccgcttgccgtgccgttctttttcttcccgttttcgagcagctattcgtcgggtttcctcatgcctacctatatggatgactccagccgcggtttcggtttgacggacggtggatattactttgccatcagtgacaagatggatttgaagttgcgtgccgatatttttacgaaaggttcctgggctttgaatgccgagtccaattatatcaaacggtacaaatattcgggcttgtttcaggcaagctaccaagtgacgaaaaccggtgataaaggattaccggattattctgtggctaaggacttcaagattgtatggtctcacagacaggatgcgaaggccaatccgaatcagacattttctgccagcgtgaactttgctaccagtagttatgagcgtaccaacatcggcaatatgtacaattcgaatgccatgtcgcagaatacaaaaacttcaagtatcagttattcccgttatttcttcgacaggaaactgacgattgcggcaaccaccaatatcgcacagactatgaaggactcctcggtcaatgtcactctgcccgacttgaatatctccttgtccacgctttacccttttaagcgtaagaaagcggcgggtgaagaaaaatggtatgagaagatttccatccggtatacggggcgtttgaccaacagtatccagaccaaggacaacctgctgtttaaatccaatctgataaaggactggaaaaacggtatgaagcatgagatacctatcagtgccactttcacattgttcaagtacttcaatgtaacgccttctgttaactataccgaacgctggtatacgcgcaaggtcatgaaagactgggatcctaatgccggaggaagcggcagggaagtggctactgatacgatttacggttttcaccgtgtgtatgattacagagccagcctgggtatcaatacgaagatatacggtatgtataatcctatattccttcccaaaaagaagatacagatccgccatgtcataaccccgtcggtgagcataagtgccgcaccggattttggttcctcgcgctacggttattacgactcctatatcaagaattatgcggacggaagacgggatacggtggtttattctccctatgccggtcaggcgtttgatgtgccgggaagaggcaagcagggaaatataaccttcagtatctccaacaacctggagatgaagtattacagcagtaagaaggatacgattaagaaaatcagtctgattgacgagttgggagctaatattgattacaatatggcggctgcgacacgtccttggggtgaccttgggctgaatttgcgtttgaagttgagcaagaattacacgttcagtatgagctcttcattcaagacatacggttataagttcgataagaatggaaatgtggtagagaatgaccgtacggaatggtcttacggacgtttcggcattttccagggatacggttcttcctttagctatacgtttaataacgaaacatggaaaaagtggaaagagaagctgagcggcactaaggatgccgataaggagaaagataaggaaaattcttccgaggaaggggaagatgtggaggcaagttccgatgagagcggcattcccaagaagaaagtggaaaaggcagcggtggatgccgatggttatcaggtgttcaagatgccctggtctttgaatttcaattatagttttaatatttccgaagaccgtagcaagcctatcaatcggaaaaagatgcgctatccttaccgttatactcataacttgagcgcttcgggtaatataaaactttccaataagtgggcggtgagctttaactccggttacgattttgaagcaaagaagatagtacagaccacctttaatatcacacgtgacctgcactgtttcagcatgtcggccagtctgtctcctttcggacagtggaaatattacaactttaccattcgtgccaacgcaagcattttgcaagacttgaaatgggagcagagaagccagacacagagtaatattcagtggtactaattagggtaatgtttccaactgtttctggcggcattatttgattttaggcacggaattacacggagttcacagattttgataacgttatctgtttcattccttctcctgtgaaatccgtgtaattccgtgcctaaaagaaatcgtcaagcacattttttcgtaccccctttttatcagtgccgccttaccattttatctcttcctttccgtgcgctttcaggtattcattcgtcttgctgaaatgtttgtttccgaagaaaccgttgtatgcggaaagaggagaagggtgtgcggatgtcagtaccaagtgtttgttgcgatcgataaaagcaccttttcgttgtgcataagctccccataatataaagaccaaatgctcccgttcttcggcaagaatacggatggcggcatctgtaaatgtttcccagccgcggttctgatgggagccggcttgatgggcacgtacggtgagagtggcattgagcagcaatacgccttgttccgcccaacgggtcaagttgccggtaggcggcgcatctgttccgatatccgctttgatttctttaaaaatattgactaaagagggcgggaagggcacgccgtcgttgacggagaaacagagtccgtgtgcttgtccgggaccatggtatgggtcctggccgataatcactacctttaccttgtcaaaaggacataagttgaaagcattgaatatcaattttcctggtggatatatggcatatttaccatattcctcacgcacgaagttcgttaatgtgtaaaagtaatctttgtcaaattcaggctgcaaatgtgctttccagctatcttcgatctgaacgttcataataggaagtgttagtagtttacgacgctaagatacaaatatttcaccatagtatacaaagagccccgcagagttttttgctttttcctttgaaactctgcgggactttatattgtttacaggttgtatttagattaaatgtatgttgtgtgccttacattccgagcgcatatctgcgggccagatgctggcttgtatttctccgatatgggctttgcgcaaatagaacatacacagccgggactgaccgataccgccaccgatagacaagggcagcgcatctcccatcaggcgtttgtggaaatagagttccagacgtttttcttcaccttcctgcttgagctgacgctggagggcttctttgtctacgcggatacccattgaggataattccacactgcgttgaagcacatcgtcccacagtaataagtcgccgtttaagccgggcagaccgttcaagccgggagttgtatagtcatcatagtccggagcgcgtccatcgtgttttttgccgtcgcttagtttgcaaccgatgccgatgataaatacggcgccgaacttcttggcaatggcatgctcacggcatttcggttctatattgggatacatctgccggagctcttccgcatggataaagtgtaacttctgtggcaggcagggcttgatttgcggatacatttcatataccatatattccgtacggaccattgcagcataaatgcgggtgactatctctttcagaaagtctatgttacggtcttgttcggtgataacgcgctcccaatcccattggtctacatataaagaatgtaagttgcccagctcttcgtccgcacggatggcattcatatcggtataaattccgtatcccggttctataccgtattcggcaagtgtcagacgcttccatttggcaagcgaatgtaccacttctgcctgcgcatcgcctaaatctttgatgggaaacgacacagcccgttccacaccgttcaaatcgtcgttgatacccatgccttttaatacaaagagaggggcggtgacacgacgcaggcggagttcggaagaaagattcaactgaaagaattctttaatttgtttaatgcctaattccgtttgttttaagtccaataaaggtttgtatccttcgggttttatcaggtagctcataggtttaatttctgaaacttctattaatttgttcggcaaagatagaaataatattgatacttgtttctgttttgattgaaaaaataacaaaatgtatatgtatatccgtttaatgttctcaaaataatattgaaagggtaatatgcaaaacagatataaaaaatgtatgaagattaggaatatgcagagattttttctacttttgcatccgaattaaggctccgtagcttagtgaatagagcgtcagattccggttctgaaggtcgtgcgtttgaatcgcaccggggtcacaggaaaaaccttgataaactattggttatcaaggtttttttatttatatatctcttgggtcatccgcctgtttgtccttattcatcaagacccatatctgtcgttgccattcatatacggcaaatctctcatcatcggaattgtcggtcttgtcaacatatgtccttatacttggggcggaagggtatttggtctggataatatcgtctatcagatagctgtacaatcctctgattttcttgaaaagaaagcattggaacataaggttgatatattcagggttgttgcatacatacattttatacatttgatatgtatccgactgcatgtaatctgaagccctgctgctaagattggacttctcaagttcttctttcagggcttcttccagctttttgtactcggcagagtctgttatgctgtaccaataatgttcatcgggcttagtggttagctttatccatgtgtaggcttcccagtaatcaattgccattcttatggaatctctgtattccgggggcatggcaaaatagagagaatctttttcccagtccttgaaaagcgtttcgatagaatcaatcttctcttgtttcagttgtttatatatgtccggtagtttttcatcaagaacggaagttatctggaaagcaccgctctctatgctacagttgacccgtggattggttatgacagaatcattgaatatgaaagctatctgcctgcctgttgcctttcccgtttcctcagcccatttctttcgtttatagttgctgatttgtccgctgattacatattttccgaaataatccgtatccagtttaagggcgatgaaatccttcgtcgttacgataggctctctggaaatgctgtccgtctgtccggacaagatatgataccagccattttcccgaagcttgttctggcaaatcgaaaaatacggcaggaaagaaaacaatgtcagtattccaagcagctttctccacataacgtctctttgttttctaaacttcaatttcaagaattgtcctctctttactcttcagatgcaagcgcatcccgcacagcttcccagttatcgcagaaagcctgcatggaagggaataacagattggctcccacatccagcagcacttgtccgtccagcggaccggtattgacagcgattgtgaatatccctgccgctgctcctgcctggacgccgatgggtgcattctccacgacgatagcttcattggcctttacccctgctttttccagtcccatgagataaggctccggattgggcttgccatatttcacatcaaaggcggtgaccatacgttcgcgttggaacatgccgggaaagttatgtgccagtctgtccagcagggagtgctggccggaaccggttaccaatacgggagtcagcccttccgcttttattttctgtaacacttcccatgctccgggcatacgttcgggttcgggatgtctgttgaattcttcgcttttttcggcatagatactctctatcatctcaggagtggcatctttgccgtattgccgttgatatacgatgttgattgttgctgctcccgtacgtccttcgtgcatataagcttcctcgcggctcagatgcagaccatgacgttccattaccgtatgccatgcatcggcatgataaggcatggagttgaacaacacgccgtccatgtcgaaaagaacggctttcagccggatattgtcgtatccgtgttctcttaaatagcgggatattgcttctttaaacacttgataaattgagaataaaaaattagaaataggggaatataaaacagagagttgggaatcaagaaacagccttttgatgttgcacatggtaatttgtgtgcagccatttctcaattctcaactctcgatttttaatttatcacagtcttgcctggatggctttggattcttcttcgtaacccggcttgttcagcagggcgaacatattcttcttgtaggcttccacacccggttggttgaacggattaacccccagcaggtagccgctgatgccgcatgctttctcaaagaagtacagcaatccgccgagactttcctcgttcagtgcaggaatcacgatgcgcatgttgggtacgccaccgtctacgtgagccagttgtgtgccgagttccgccatcttgttcacctcgtctacgtgctttccggcgaggaagttcagaccgtcgaggttggcttcgtccgaaggaacttgcagcgaatactgcgtcttttctactgaaatgacagtttcataaatggtacgttcaccttcctgaatccattgtcccatggagtgcaggtcggtagagaaatccacggatgcagggaagatacccttgttctctttaccttcggattcaccgtaaagttgcttccaccattcgcttacgtagtgcaatttggggttgaagtttacaaggatttcaatcttcttgccgttcttgtagagttcattgcgggtagctgcatagatagctgccgggttttcagcgaacggaacatcctttccgcaagccttttccatagctaccgcgcctgctaccagtttttcgatgtcgaagcctgcaacggcgatgggcagcagacctaccggggtgagtacggagaaacggccgcctacgttatcggggataatgaaagatttgtacccttcattgtctgcggtaacgcgtgctgcgcctttcttggcgtctgtaacggcaacaatcaccttttttgccatctccttgccgcgttggtcttcgcattgctttttcagcaggcggaaggccaaagccgtttcggtagtggttcccgatttggaaatattgatgacaccgaatttcttgtctttcagatattcagtaagctcgtacagataatcttcaccgatgttgtgtcctgcatacagaataaccggaccggacttcttgtcctgcaaccatgcgaaactgtttgacaaagcctcgataacggcgcgtgcaccgaggtagcttccgccgattccggcaataaccactgcttcacaattctcgcgcagcacttgcgcagtagctttcaggtctgccaggtgctcctttgtaatggaagaaggaaggtgtagccagcctaaaaagtcgttgcctttaccggttccgttttccaatgcttcctgtgctgccttgacttgggcttcgtaggcgaaaacattttctttggaaatgaatccaagagtcttttcaatgttcaaactaatcataatattataggttttaaattctgtattttgtccttgctgtcctcttttccgcattaccggaaagagtcagtcagtaacttgatttcaatcatcggtgagatgcgctcatataagatgttgtacacagcatccagtatcggcatgttcacgtggtaatgcttgttgatttccttgatgcacttggttccgtaataaccttcggctatcatttccatttctatctgggcactttttacggaatatcctttacctatcattgtaccgaacgtacggttacggctgaagttggagtatcctgtcaccaacatgtcacccagataaacggaatcgctgatgtttctgttcagcggatgtacggtttgcaggaaacggttcatctcctgtatggcattggacatgagtaccgcctggaaattatcgccgtatttcagtccgctgcaaatgccggcggcaatggcatatacgtttttgagtacggagccgtattcgatacctgccacgtcgttgcttacggaagtcttgatgaatgaacttgccaaacggcgggaaaacttgtccgccttgtctatatcgggacacgctatcgtgagataggaaagccgctcgagcgcaacctcttccgcatggcagggacccgccagcactgcgatattttcggtaggaacaccgtattctttggtgaagtattccgatacaatcatgttgtcatcgggtacgatgcccttaatggcagtgatgatgaacttatccttgatttttgtcttcagcttcttcaggtgagccttcagataaggagaaggagttacaaagataagcgtatccgactccttgactacatcgttgatgtttgagttgaaattgatacgcttggtatcgaacttgacgcccgtcaggtaggcagggttatgaccgagacgcttaaaatcggcaatgcggtcgtcgcgccgcatataccaatttatagtatcttcttgtgccagtaccatctttgcaatggcagtggcccagcttcctccgcccataatggctatcttaccgggtagtttcatttcttagattttctcaacccaaccttccacatctttcacggtcggatttgccagttccagtttatatttcttgttgatgccgcaaatgtccatgtgcagcttttgcgggtttacatccttcatgtcgctaaccaggttgtagccggctttctggatgactgccacccattcttcggggatacccagttccatgaatttggcaggcgcgtctttcggagtgaccttttcggggcgcatctgcgggaagaacaatacttcctggatgaatgcctgtccggtcatcaacatcgtcagacggtcgatgccgataccgatgcctgatgtgggaggcataccgtattgcagcgctttcaggaagtcctggtcgataaacatagcttcgtcgtcacccttttcactcagtttcaactgctctttgaagcgttcttcctggtcgatggggtcgttcagctcactgtatgcgttggccagctctttaccgttcaccatcagctcgaagcgttcggtcagtccgggcttgctgcggtgcatcttggtcagcgggctcatctctaccggatagtcggtgatgaaggtaggctgtatgaatgtgccttcacagaattcgccgaagatttcgtctatcagcttgcctttgcccatagtgtcgtcaatctccattttcagttcgcggcacacctggcggatttcttcctcgctcttgccgttgaggtcgtagccggtcttttccttaatggcatccagaatgggcaggcggcggtaaggagccttgaagctgatggtctttccgtcgatggtagtctctgtgctgccgtttacagcgatacagatacgttcgaggagtttctcggtgaatcccatcatccagttgtagtccttatactgtacgtacagctccatgcaggtaaattccgggttgtggtttttgtccataccttcgttacggaagttctttccgatttcatatacaccctcaaaaccgcctacgataagtctcttcaggtaaagctcggtggcgatacgcaggtagaggtccatatccaatgagttgtggtgggtgatgaaggggcgtgcgcttgcaccgccggggatggattgcagaattggtgtttccacttccgtatagccggcttcgtccagtacggcacgcatggtcttgatgattgtggcgcgtttcaggaatgtttccttgacgccgtcgttcacgatgaggtccacgtagcgttggcggtagcgcagttccgggtcatcgaacgagtcgtaggccacaccgtctttatattttacgataggaagcggtttgatgctcttggcaagtacggtcagcttctgggcatggatactgatttcgcccatctgagtgcggaatacaaagccttcgataccgatgaagtcgcctaaatcgagcaagcgtttgaatacggtattatacatttccttgtcttcgcccggacagatgtcatcgcgggtgatatatatctggatacggcctttggagtcctgtaattcgatgaaagaggctttccccatgacgcggcggctcatgatgcgtccggctacggatacgtggcgcggttcggcgtcgtctttgaattcttttttaatatcggtagagaaagcgttggttacatactctgctgcgggatagggttcgatacccatcgcgcgaagttcattcatgctgttgcgacgaatgatttcttgttcacttagttctaatacgttcatttcgctataattcactcaatttggggacaaaaatacgaaacatttttcagatagcgaacctttaggggaatttattcgccgtatgctccgtgtgctctgtggcaggttgtgggataatcgccgggtaagttctcgggagaaggagccttgggtcgggcttgatacgctttcttccctgtctctgatacgcttccggtaggagagagtgcggttcttccttaagacggggcgcgatacttgctcacctgacgaattttgagtacctttgcgccctcgaaaaaaacaggtaaaaagtatggcaggacaaaaaacacccacagcgttgggcacggagaatataggtaaattactgatgcagtacgccgttccggcaatcatcgccatgacggcatcttccttatataatatggtggacagtatcttcatcggtcacggtgtgggcacaatggctatttcgggactggcgttgactttccccttgatgaaccttgcagcggctttcggttcgctggtaggtgtgggagcggctacgttgatttccgtcaagctcgggcagaaggactatgacacggcgcagcgggtactgggcaatgtatttgtgctgaatattctgctgggtgtggcttttacggtggttgtaatggcattcctcgaccctattctttacttcttcggcggcagtgacgagactgtggggtatgcgcgcgattatatgcagattatccttctcggcaatgccgttacgcatctttatctgggattgaatgcggtgctgcgttcttcggggcatccgcagaaggcgatgtatgccaccattgccacggtgattatcaacacgatactcgacccggtgttcatctacggtttcggctggggcattcgcggggcggccattgccacgattgtggcgcaggtcatatcattgatatggcagctcaggatattcagcaataaagacgaactgctgcattttcaccgcggtattttccgtttgaagcgtaagatagtcttcgattcactggctatcggcatgtcgccgttcctgatgaatatggcggcatgcttcatcgtaatccttatcaatcagggattgaaaaagtatggcggcgatttggctatcggcgctttcggcattgtcaaccggctggtatttatcatcgtaatgattgtaatgggactgaaccagggaatgcagcccattgcgggttataacttcggagccggacagcatgcccgtgtcatcaagactctgaaactgacgataatctatgcaacctgcgtcactactttcggctttattgtgggtatgctcttctccgactgggtggtgagtatttttacttcggatgccgaactgattgccctttcggcaaagggcctgcgcattgtggtgatgtttttccccattataggctttcaaatggttaccgccaatttcttccagagtataggaatggcgagtaaggcaatatttctttcccttactcgccagatgatggtgttgctgccttgtctgataattctgcctcgttttttcggtgtggcaggcgtttggtacagtatgccgatttccgacttgctggccagtctgatagcgggcacgatgctggtgtggcagctccgcaaattcaaggcgcaggcataaggcggtattgtgttaaaacaaagatacttactaccggtctcttttcagctacatccaactttcatcagtttggcagcggaaccatgggtctgcgtccgtgattcagcttcaagcctgctttataggactccggaccgtgcaggttctttatatccatctcaccgagattgaccagaatgccgcgtgccatgaggccggcatcttcgtttgctttgcgcggaagtgtttcggctttgtctttcaggtctgccagatgcacgcggatggcgggctgcatggctttatccagagagaggcattccagcagggaataaccgatttttctatcggcttcttttgccggattattcaggcgttcgatgcctttggcggtttctcccagataagcggcggcataggcggcttcgcaggctatgtaggggtcggcatccttgagcaaggcaagcagaggtgcgggacaggttttcaattctcctttggctccgagttgtgccaaaccgacggacgcccaatagcgcatttcgggatattggctggacagtgctttctcgaatacgggagcatcgcctgcatgggctgtacctgccagctctacgaggttgtacagctcgttcaaggggtatttctctttacgtactttatcatacaataccacattctcgcgagaggtgggtatgaagaaacccaggtctttggtgacgcggatatggttggaaagggctgtacgcatctttaccagtacttctgcgtattcgggagagtcggacaggttgtgcagttcaccggggtctttttcaaggtcgaacagcatttcggcaggatgggcattgaatgtctgcgcccagtcggggttggtgttatgtccgcctaaaaccagcttgtcccatgctttgttggacggcatgccccattggtagtaattgcgcagggcaaactgacggtagggtatgtagctgcggatgtatttgaaacgtccgtcggttgcggcacgtaccggcatgaagtggtgcagttggttggccgccagtgcgaactggatttcacgcttttcatcggacgcgtacttcccgaacaatgcctttccctgcatgtgtttgggcggttttacgcctgcaagactaagtacggtaggtcccaagtctgtgaagttgaccaaagaataatctttgccggatgctttttctcccgccaggtgttgccacttgggcgggaagtaagctatcaggggcacttccagaccgctttcatacagatagcctttgccgcgtggaacgcaaccgccgtggtcgctgaagaagaagataatcgtgttgtcgtccagtcctttttctttcaggtctttcaggaagaaccccaaccatgtgtccacatcctgcacggcttccagatggccggcatagtcggaacgtacttcgggcaggtcgggcacgtaggcaggtagggtgagcagttccggataaatgccctcttgggtgtaatctcgccgtccgtcggtatggaaggtgcggatacgtcccatgtgcgaggtcaccgtattgtatacggcaaagaaaggctggtctttaccacgcttcgggctgttgtaagaggcttctctcgtacattcgtcccagcagcttttgttgtccgtggtggagttgtagtgtgtcttgctgttgttggtgcagtaatatccggcttcacgcagccattgcgggaagaagatgtttgccggggtgtcgtatggaaccggatggacatccattccgtaggtcgaggagtagcaacccgtaatgagcgatgagcgtgcggccgaactttgcggggccaccgaccatgcgttcatgaattgtatgccgcgggcagccagactgtctgcattgggggtgtgcacatccttgttgccgtagcagccgaattcgtaagcactggtatcttcgaaggtgagccagagaatattgggcctttcgtttttcttgttgtctgccgcatccgcttgggcggtatgcagcccgcagaaagcggtacacatgagtagagataagtttttcatgctatattaaatgttagttttacatgttatatcggtttttcagtagtggttgctaaggtagggcatttgttctgataagcatgcctgatgtgtttaaaaagctgctaatattgttttggcatgcaggttttcaacaaaattgatgaagattcaacaaaattgcagaaccggtaaacgtatgttgcggtgtattggagaaaataaggacgctatattaccggaatgtcttacttttgaaaaataaatctaatagtgtataatggtatgagaaacatcgtttttatagtgattgcgtttgtactttctttctcgggacgtgtatgtgccggaaatcccgtttattcagacaactccttgcgcaatgatgcggagaaactgctggtggagtgggtggatgctctgctgacctaccaatgcgaagggctgcatccgtcgctcgacggcggtattctgtgtcccgcctgtgcccgcattcacggacggataggagacacggttcttcctctgatgtatctggcagacaaaaccggcaatgacaaatatctgcttgctgccaagaaactgatgaaatggatggagaacgtgcaccgtccggacggctcctggatgaacgatgtacacgtatccgattggagcgggactaccgtattcgccgctattgctctgtatgaggcagtgcattatcacgggcatctgctggatgactctacgcgtaaccattggaaagagcagttgttggaagccggcgaattcatgatgaagaatccgcagatgtacagccgccgtatgcaggggagtatgaagcgcctgaacaatgtgaactattccgcttcggtgacgtatgccttgcaggctcttggagagatgttcgaccgcccggacttcaaggaggaagcccggattgttgcttcggacttgaagaagttctttacggcgaacgattcctttttatacggcgaaggacctaaaatatggacacctaccaagaacggctgcctcccggtggacttgggatataatgtagaggaatccttgcctaatctggcttattatgcgcttatggtgaacgaccgggagttgctctccatcgtggaacgctccatgaatacccatctggaatttatgttgcccgacggtgcatgggacaacagttggggcacgcgcagttttaagtggacatattggggcggacgtacaagcgacggctttatgggcggttattatgccatggctgcgcatcatccggagtacctggaggctattcgccgcaatatacaattactgaaaaaatcgacggatgacggtttgcttcatgccggacgcgattatcgggcctctggcattccggcttgtattcatcataccttcggacatgccaaggcgctgacggcttttcttgagcttccacccgtcaagacgcaacaatacaaggcattgccgcgcgataatgcttatggggtaaagtatttccgggatattcgtacatggctggttgcagaaggtccgtggcgttctacatgtaccggtttcgatgcggaatataaggtaaaaggaactcatcccatgggaggcgccgtttctctgttatggcacgaacaggctggtccggtatttgccgctacgaccaaccggtatgctttgatagaagcacccaatatgcagagcaacagtcggaagtatataatgagcggaacgccgcgggttgaaatggtgcaatacggaacgatttacagtaatctggacgacttggatacggatattacgtatactaaagaaaaagatacgcaccgtttccatgtcaatacccatctggtggatgccgaccagcagactccgattcagggagcgattcccgtaacgttggattatgtgtattcccaacagggcttgtcgatagaaatggaacattgccctttgaccgcctgcctggttttaccggttatcgccgcgccttcggaagttgtggatattacgccggaaggcatgcgccttcagaaaaaggacggcgtgttggaggtagtttgcgtgaacggcaggatgaaggttgctcctaccgataaagacggacggatatttaatcctgtgccgggcttttctttcattcccttgcaggtttttccggatagtccggataagaaaattcaagttaaaatcatgcataattaatgtattttttattttctttgttctgtgttaataatgtaatatgtatgaaaatatttcgatttttattagtattatgcggaacattgtttgccagtatggggcttgccggtgaaatagacggtatgcgtttcatacatatcggtttggaagaagggttgtcgcatagtaccatattcggaatcaatcaggataaagaaggcaatctgtggtttgccacttatgacggatttaataaatatgacggttataattttactgtctaccggcatcagtataagaatccgaagagtatagccagcgatataacccgttgtgtcgtcattgacaatgataaccggatatggataggaacgagagaaggcttgtcgctttataatcatcgcaagaatgaattttctaatttcttttataagaaaaagggacaaaatgtaacagtcaggaatattgtgcctatgcagaaggactggcttatgcttgggacaaccgaaggtattttactttttgacgtgaaaggagaacgtttcctgaatgatacgttgtcggctactttacattcgttgaaaccgttaacgctgctcaggcaagatgatgatatttttattggcactaaagggaaggtatatatgtattcattgcaaaacggagcattggaaacattacttgacctgcatgacaaggtgcagataaacagtatcttgtgccagactcccaatcggatatgggtagcgactgaaggcaacgggctgtatctgtatgatgtaaagaacaaaaagctggataactatcgttatgagaataagctttcctgtttgaactccaattatgtgcgttcgttggcattggatcaggagaaccgtttgtgggtagggacttacagcgggctgaatatatatcaggaagggaaagaacgctttatatcggttgagagttcgatggctcaggcagggacgttgtcgcagaactcggtgcgttgcatcttcagagactcgcagggcggaatgtggctgggtacatactggggaggattgaattactatcatcctttgtgcaaccgtttccagcagattaaacatattcctttctccaattcgctcagtgataatgttgtcagttgcattgtagaggataaaaagaacaatttatggatcggaacaagtgacggtggtctgaacttctatgataatacggcgaaaacttataagaattatttgtttaatccggatatatcggaaggtgttccttttaaagacgttaaaacggtatatgtagatgaagcatcggataagatatatgtaggcgcccacgctggcggtatgatggtgttgcatcgtaaaaccggaagaaaggagttttataatcagcaaaacgggggcttgccgagcaatcatatttattctattatatccgatgggaaagacggtctttggatagcttctctggactatttgtttcattttgatattgccggaaaacgctttaccgttataaatgaagatgtggaagggcattcgattcaaaaaaagaaccgtttgctatttagggattcccgtaaacgcatctggataggtggggagaagggactttccgtttataatcaggtggggatggcttggcaggccaatacggattttcgtataactccggtattgcaacagtcttttgtgaattgtatctacgagtctttatccggttctatatgggtaggtacccgtgacgggctttttgccttgaaggaagcggataaggagttgcagcaatatacaacggacgacggtttgccaagcaatgttatctatggaatactggaagacagttacgggcgcttgtgggtcagtaccaatcagggactgagttgttttgacccggagaaccgtaaaatgcgcaattttacaatagtggacgggctgcagagcaatcagtttaatgccggttcttattgccgcatcggcaatggcaatatgttgttcggcggcattaacggcatcaccatgttccgtcccgaaaccctgatagacaacccttatactccgaaaccggtaatcaataagctttttgtttttaacaaggaggtgcttccgaatgatgaaaccggaatactgaaagagaatatagagagtgttaaccacataaccctgaaatcttcccaaaactcgttttccctttcctttgtcgtttccaactacatagccggcaagcacaatacgtttgcctataagttgaaggggtatcatgatgaatggtataaacagggagacataagtccggtgtcgtactccaacttgccggcaggagattataccttccttttaaaggcagccaataatgacggaaagtggagcggggaggtagaggctcttcacatccatgtccttcctgtctggtatcgtacgtggtgggcctttttgatttttgcgttgttttttattttgttggtttttgcagtgttccgtttcttctggttgcgtaagagtatgcagacagaaatccgtatggagcggcttgatagggaaaaaaaggaagaaatcagccagatgaaaatccgtttttatgtgaatatctcacatgagttacgtactccgttgactttgattatttctcctttgcaagagttgctcagcagtgtcaccgggcattgggagcgcgaaaagctgttgtatatccagcggaatgcaagaagactgttgcatttggtcaatcaactgatggactaccggcgtgccgaattgggtatttttgagttgaggccgagttatgccaatgcatataaaagggtattgaacagctttttaaattacgagagtctggcaaagaaaaaggacatagactataatttctattcggaattgcaggatgaggatgtgttgtttgacggtacttatttggatttgattatcaacaatctattatccaatgcttttaagtatacggaagaaggggagaggatttatgtaaaactctacagagaagataaaaatgttgttttgcaggtagcagatacgggagtgggcataccaaaggataagcagaggaagattttcgaacgtttttatcaggtagagaacgtacacgaaggaagcggcatcggattatcgctggttcagcgtctggttgaattgcatcacgggcagataacgttggtgagcgaggttggaaaaggctctacgttttccatttatattcctcaggacaagtcggtgtatactgcggaggaacttgcggagagcaagggagagatggaggaacagcgtgtctattcgacaaatgcgcatgaggtttataccgatgatgtagaaacggaagtggcagaagccggtgaaaaagaggcgggaagcaggcatggaacaattcttatagtggaagacaatgaggagctgcggcggtatttgttcaacggtctgtccgctcagtttaatctgatagaggcggagaacgggcaaaaggcgttggaggtgcttaaagaaaatgacgtagacctgattctttcggatgttatgatgccggttatggatggagtcaaactttgtaaatcggtgaaacagaatttgagaacctgtcatataccggtgtatctgttgtctgccaaggtcgatataaagtatcagttgcaggggttgcaggtaggtgcggacgattacatacccaaaccgttctcgatggatgtattgatagcaaagattttgaatatgctgcgtacccgctatcgtatttttgagcattattccaatgcggcagagatagaaccggagaagatagcaaacaatgccatggatgaggaactgttgaggaaagcgattgctgtcgtggagaaaaacatgagcaatgtggagttctcaacggagcagtttgccagcgagatgaatatgagccgttccaatctccatttgaagttgaaggctataacaggaaaatcggctattgattttattcataaaatacgttttaaccgtgcttgtcagttattgaaggaaggtaagtatacggtttccgaaatcagttttatggtgggatataatactccttcttatttttccgcccgtttcaagaagtatatcggttgtcttcctacggagtatggaaaacagtgacgtatgtatcatttatggaatattattatgaagatgtattttttttctccctttcttctgatacttgttcattcattgctggtatcatgcagccgtacgggcacatccggctttacgatagcgagggaagacagtttgcggtatgaaggcaagacagttgaacttttcagaatgactaacaggaatggaatgacggttaaggttaccaattatggggcttctttaacatttgtttccgctcctgataaagagggcgtttttgctccggtagttttaggacttgacagcttgcgatattatctgggcagacaacccaagcttggtgctacggtagggcgttatgcaaatagaataaggaacgcggaacttgttttgaatgaccgggtctactatctggataaaaacaataaagggcattccattcatggtggcgtcaagggatttcatacccgggtttttaatacggatacgtcctatgtggtgaaggatacggcagtgattcgctttagttatctgagtcctgatgcggaagggggatttccgggaaatctgaatatatcgttggcttataaattgacgcatgacaatgaagtgattctggattacagggcatcgaccgacaagccgactgtggttaatctgacaaatcacagttatttcaatttaacggggtgtaaggagtctgtactgaaccattattgtatgattgacggggattcgattacaccggttgatgccgcaggtattcctaccggagaacttatggcggtggcgggtacggaatacgacttcagaaccttgcaggcgcttggcgggcgcattggagaacttaaaaaaggatatgataccaattataaactcaataagcagccgggaactttggcgcttgcagctaaaattgtagagccggaatccggtcgggtactgaaggcgtataccaccgaaccgggtatgcagttctatactccggcagctaatctggactatctgaaagggcatggcaagcagtcatatgggcggtattacggattttgtctcgaaatgcaacattttccggattcgcctcataatccgcattttccgactaccgtgttgctgccgggagagacttaccggcaaaccacggtctacagatttgaaacattatccgaaacagaataaattatttaattaaaacattggttatgaaaacgaaaagctggaaaaagtacatgtgtttaatgggtatttcacttatgatgatgccggctgtctgcgcaatgcaaacggctgaaggcggaaatggggacaatcccgttaaaaaaacgcgtagcactacttttattagtggagaaaaggcgtgggaacccgcaggagaaggcgtgacccggcagattatggggtatgacggacaggtaatgctggtaaaagtgaaatttgaaaaaggagcgataggtactcctcatactcactaccatacccaaaccacttatgtggcaagtggaaagtttgagtttacggtggggaatgagaagaaaacggtaaaggcaggtgacggtatttacatcgaacctgatattttgcacggatgtgtctgtctggaaccgggggtacttatagactgctttgctccaatgagaagtgatttcttgaaatgagtgttgtattgatgggtatttgactttattaacagatttgcaaatctctatcccaaaaggataaccccctttgtacatagctgtagggctatatattgtacaaaattactctgtattatacaaaattgatatttggaaagtgtaaaagtgtaacgaatgaaaacaatacttttacactttttttagcatttgcagtaagtttgccctcgaaaaattatttctaaagtagaaccttagatttatttattatgtacaaattaaaagaactgtttttaatgtttatcctcgcctttgtgagcatatccgcatatgcgcaaagtctgaccgttaccggtaaggtcattgatagtgagggctatgaagtaatcggtggtagtgttaccattaaaggcgccgccggcgttggaaccgttacggatgtaaacggtaactactccttaaaagtaaatgacgcatccaaagatgtactcgtcttttcgtacgtgggtatgacttcccaagaagtaaaggtcaatggtaagaatgtaatcaatgtaacgttgaaggctgatgccgtgttactggatgaagtagtagcaatcggttatgccacggttaagcgtaaggacttgactgggtctgtggcatcggtgaacagtaaggaactttccaaagtgccgacaagtgatattacccaggcattggcaggacgtatggccggtgtacaggtaatgcagagtgaaggtgcgccgggagcttctatttcgattcgtgtccgtggaggtatttctattacacagagcaatgagcctctttatattatcgatggttttcccagcgaagatggtatgtctacgctcgaccctgctgaaattgagactatcgatattttgaaggatgcgtctgctacggctatttatggagctcgtggtgctaacggcgttgtagttattactacaaaaagtggtggtaaagaaggcaaggctacggtaacttttgacagctatgtcggtttcaaaaaaatagccaagaaattggatgtcctttctacggcagagtttgcaatgttggattatgaacgccgtgtgtacgatgctactactcaagaagattgggataaggatattacggcttttgaaacattgtacggaaaatatagtgatatcggaactaactattccaatcgtaaagggatagattggcaggatgaaacgttggggcgtactgcgttgactcaaaactaccgtgtaggagtttccggtggaacagataagctgaattacaacttggcatattcttactatgatgaagagggtgctatggtgtatagcggtaataaaaaacataacatatcattcaatatgaatcataaattgaatgaccgtttaagtgttaatgcccgtgtcagctatgatcaaatgaaagtttatggtatgggtacttctgaaggtggtgaccgttttaacaagatgcagcatattttgcagtatcgtcctatgataggaattggaggtacagatgatttgctgttaggagatgaagacccgatttttgtggacgataccggtaatgtaatgcagaatcccctgctttctgctgctgaagaaaccaatgatcgtgagtatcgtacttttcaagccaatggtggctttactttaaagctttttaaaggattttcgttccgtaatacaacaggtatgcgctaccagacacgtcgtaatgatattttttacggtgataagtctataacggcaaagcgttccagtattaatggaagcattcaaaatctggagaacagcagtttccaaacatcaaatgtcttgaattatacttggtcgggtaaaggacacgatgtaacagccatggttggtcaggaatacgtaaaccgttggagtcgtaatttcaaagcggcagccgccaatttcccgaacgatgatattggtttaggcgacctttcactgggattgccgacagctgtttcatctgctgaaaattatgatgacaagctcctttctttctttacacgtgttaactatggctttaaggataaatatttgtttaccgcttctttccgtgcagacggttcttctaaatttggtaagaataataagtggggatatttcccggctttttctgcagcctggcgtttgggagaagaagaatttattaagaatttgaatgttttttcggatttgaaagttcgtttaggttatggtatggctggtaataatcgtatagacagttatctgagtctggcagtattgaattccgtcacttatcctaatggtgattctactcaatcaggctatgtacccaagcagattcctaatccggaccttaaatgggaagctaacaagacattcaatttcggtcttgattttggtttcttcaatcagcgtttgactatttctcccgaattttatatcaatcgcagcagtaatctgttgctgagtgcaaaattgccaacatcggcaggttatgacagtatggtcatcaatgccggtgaaacagaaaataaaggtattgatttgactatcaactcaactaatattatgaccaagaactttacttggaatacttctgtaaccttatcgcacaataaaaattctgtaaaacagttgacgggagaagaagtgcaactttgggaagctaatttcggatatagccaaaacacacatattatcggtataaaccaaccgttggggcagatgtacggttatattacagaaggcttgtatcaggtgtctgattttgattatgatgcaaccacccaaacttacacattgaaagatggcattccttatgcaggcgataaagccaatgtgaaacccggtatgtggaaatttaagaatgtagacggtagcgaagacaataaaataacagaggaagacaagactgttattggtaatgcgtatcctaaattttatggcggtatcaataatacattcacttataaagactttgatttgagcattttcttgacttatagctttggcaatgatgtacttaatgcaaccaagttgactaacacaaagacggctttgcagaataagaacgttttggctgcggccgattctcataatcgctgggttttagtaaataagtcaggtgaattaattaccgaccctcaggaaatggccgagattaatagaggtaagaccgttgccgctatctatgataatgaagtaggtgatacttatattcattcttgggcggtagaagacggttccttcctgaaacttagtaatatcactttaggatatactttcccgaagaaaataatcgaaaagataggtatcagtaagttacgtctttatgcaacaggttctaatttattaacttggactaaatattcaggtttcgatccggaagtatccacaatgggtaacggtttgacaccaggcgttgacttcggtgcttatcctaaaagccgttcatttgttttcggtattaatttagctttctaatgaacctcaaaaagaaaatacaatgaaaaaatataaaacaattgcgcttggcgcactgattgcaactggatttgcctcttgtgaactgacagaaaaaccaacttcttattatgagaaggatacctattttcaaacagccgaccaggcaaagatgtcagtcgtggggatttatgactgtttggctacaaacaaccattacggacagtttgaaatggctatgccggcgtcggatgacacttattatatacaaggtactggtacagacaatacacgtcgtgatatagcacattatatggtgaaaccgacgaatacttggattgctgatttatggaagtacaaatatatgggaatagaccgggctaattttgccattgaaggcattgaaaatatggctgggtatgaagaagatacttctttgaaagagctggtggcccaggctaaatttttacgtgcatttttggctttcgatttagtgaaatattggggagatgttccatttaagaccgactacaccgctggatatgaaagtgcctttaatggtcgtataagccgtgaggagatatatgattatattattgaagatttggactttgcgaaagaaaatcttcagaaagggagtgcttcgctttcaccggagataccttcgcagggagctgctcatgcaatgctgatgcgtgtttacttgcaacgggcaggttatagtttgcagcaagacggtagtttgaaccgaccggccgacgacaagagaaaggcctattttgatgctgtaattgccgaatggactgctttccagaataaaggttatcataactttcacccgggcggttatttaaagttgttccagggttattccggaggggttttgaattcgatggaaaatctgtgggagatagcttttaatccgacaggaagtggttataaggataactccggtacttgggctacgtataatggtcctgcggtagaagcgccgggcaagggtgctcctgctgaatcaatgggacgtgccaacgcgttcttccgtgtgttacctgtctggaaagatttctttgaggcaaatgatgagcgtagagatgtaatggtatgtacttaccaatataaatgggatgccgataagaaagcacataagttggttgaaaataagaaactgacggattggtatccgggcaaatggcgtagggagtggatgccgaaaggctttgtagatcctaataatacaggggtcaattattgtccgttgcgttatgctgatgtagtattgatggcagccgaggcttataatgagattggcaatactccggaagcctggaggttattgaatgaagtaagacatcgtgccggagctactgaaactaattcattgcaggcatacaaggctgcacagcctaatctctatgaacttccctattttaacagtggtgatgaggcagacaatttccgtactgctctttattgggaacgcggttttgaactggcttttgaaggtcagcgtaaatatgacttattacgttggggtattttgggtgatgctttaaaattattccaaagcaaaatggataaatcgctaaaaggcaaatatgttgcaggcgacaaatttataaaaggcaaacatgaactgtttcctatacctttgggcgagttgcaggccaatcccgctttaaaaaatcagaataatccgggttatgaataaataggtattattgctataaacggcaggatgcaatgtcctgtttgaaatgttgaaagatgtttcggagctggttgaaaatagtaagcctgttttttatcagctctgttaaacatcttttctatttcaaagctatatgatgttgtgttgctggttgtgccatgtagtgaaattttatgagatgattgtggaaaatagaaacctttataaaagatgaagaaaatatcattatcttgttttgttgctgttgtcgcattatgcgtattttccggctgctctcccaaacaaccggaaaaagattatacctggctgaaacagggaatagaaacggctgcgttacaattgaaatttaccgtggctgaaatcggagattcaatccggttgccccgttccatctggacgggctatgacacggactttttatgtcgtcagctggataagaaacagttgacaggcaaagactctgcccggctgaaacccatacatgataatttgggctcccgccgttattgcttttccatttacgattggacaagcggttttttccccggcaatctttggctcgcttatcaacttaccggcgatgaaagcttgagggaaagcgctgtgaagttcactaattatctttatccgctgcgtgagtataaaggtacgcatgatataggttttatgatgaattgcagctacggtaacgccaatcgtttatctcctgccgacagcgtccgcagtgcattgatacaaacagcggataacctgtgcggccgtttcaatccggagataggctgtatccgttcctggaacttcgggaagtggaatttccccgttatcatagacaatatgatgaacctggacctgctgttttatgccactcgcctgaccggtgatgataaatataaggagcttgccttgacacacgcaaggactacgatgaaaaatcattttagagatgattattcatcctaccatgtagtcagttacaataacgatgggacggtggaaaaaaagtgcacgcatcagggaaagagtgacacatcgtcgtgggcgcgcggacaagcatggggattatatggctacacatcctgttatcgcgagtctaaggatgtgcaatttttgcggcaggccgagaatatagcctcgttaatcatgcggcgcgtaaagacggaagatgcagttcccttgtgggattatgatgcgcccgacacgcctcagacgcctcgtgacgcatctgctgccgctattaccgcttccgccctgatagaactgagcacgcttgtagaagacggacaagcatatatggagtatgccgggaagttgctcaaaagcctttcgtccgacgggtatttggcaaaaccgggaaccaaccggggctttgtactgatgcattcaacgggctcattgccgaacggttccgaaatagatacgccgcttaactatgccgattattattatctggaggcattgctccgttatatgcaggtaaaagagattgattataagcatatttaaattcattattaccatatcatgaagacaataagatacatttttagcatttgcttgcttatgcttgctgttgttgcagacgcacagcaactaaggcaggaggcttttgaactgataaatttggattatcctggtttggagaaagtaaaagcggcatgctcccggcagaagtgggaggcggcggcacaggaactgttgaattattaccgtagccgtaccggtattacacatccggatatagacttgaaaaacctcaccatatccagggaagaacagaaatgggcggatgatgctttggagcataccttctttgtacataaaggctatcagccttcctacaactacggcaaagatatcaactgggagtactggccggtaaaagacaatgagttgcgttggcagcttcatcgtcataagtggtttacgcctatgggtaaggcataccgtatctccggagatgagaaatacgcaaaggagtgggtacatcaatatatggattgggttcagaaaaacccgctggtgaacatgaagcaggaagagttcgagcttgtcagtgccggtgaggtaaaggaagatgccgacaatgtatattttgcatggcggcaactggaagtcagcaaccgtttgcaggaccagacctgccagtttcttttgttttgctccgcatcggcgtttactccggagttcctgaccgagtttatcgtcaattatcaccgccatggcgcacatctcctgaaaaattattcagcagaaggtaaccacctgctgtttgaagcccaacgtatggtttatgccggtgttttctttccggaactgaaagatgccgccatttggagagaaagtggaatcaatatcctgaatcgtgaaatcaagaagcaggtatacaatgacggcggacagtacgagctggatccccattatcaccttgcggcaatcaacatattctgcaaggccttgcgcatggcggattgtaacggtttccgcaatgagtttccgtcggaatacctggatacggtcaagaatatgattgctttctatgccaacatttgttttcccgactacaccaacccttgtttcagtgatgccaagttgggcgattatcaggcagaacttgccaactaccgcgattggcttgcattgttccccgactgcgattggatacgttattatgcgacagaagggcgtgaaggcgctcctttcccttatctttcccacggggcattgacatccggtttctttactttcagaaacggttggaagaaggatgcaacggtcatggtagttaaagccggacctaaaggagagtggcattgtcagccggataacggtactttcgaactctggttcaacggcaggaatctgtttcccgataccggtgcatacgtctatgccggaagtgccgaagtgatgaaactgcgcaactggttccgccagacacgtgtacataacaccctgaccttggacggacgcaaccttgaaaccacgcagtccgtaaccggattgtggcagccggaaggtaaggagcagatactggtaacggaaaatcccggttataaagggttgaaacatcgtcgtaccgtcttttttgtggaccaggcctattttgtaatagtggacgaagccacaggcaatgccagaggaaccgtgaatttgaattatcatttccgtgaaggtgaggtaaacgttgatgcggagaagaatatggtgactacggcttatgagggttcgagtaatgtgaagttgcaatgttttccggaaaaaagcgcgtctttaagagcggaagagggctggcgttccactgcctatcgtcagcgcgtagcccgtacttcggtagctttcgatacaaataaggatgatgcggaggctgtgcgttacataacggttatctatccggtgaaggatgttgccgcttacccggtatttgaagcaaaattcctgaacaaaggttatgatgagaaaggggttgaggtcgaagtttccgtcaacggtacggtacgtcggttggcatcgcggctgaactgaatcatgaatgcggcagactgttttaaggcagacagttgctttgtgaacagtaaccgtcctgatacacaggaaatggatttgttttcattattttgatatttaatggaagaatacctatatttgctatctgcaaaacagatagattaaataaagtatggacaataaatttatagtaaatataggccgccagttaggcagtggcggacgggaaatcggagagaagctggctgcccggctgggtattgacttctacgacaaggaattgattaaccttgcttccgaagaaagcggattatgccgtgaattctttgaaaaagccgatgaaaaggcttcgcagggaattataggcggtctgttcgggatgcgtttcccgtttatcagtgacggggctatgccggctgccaactgtttgagcaacgatgcgttgtttaaggtgcaaagcgatgtgatacggaaactggcttccgagaaatcctgtttgttcgtagggcgttgcgccgactacattttgcgggataacccgcgttgcgtcaacatcttcatctctgcttcgcgcgaggatcgtatagcccgtttatgccgtctgcactctatttcggaaagtgcggcggaagagaagatgaacaaagcggacaagcggcgtgccgaatattacaactattacagctataagacatggggagcggctgctacctatcatctttgcgtcgattcgtccgtattgggcattgacgaaacggtcggctatatagaagagttcgtaaggaagaaactgaaactgtacgaataaacgctatgaccattgcaaatgaaatcgggaagaattttactgccatcctaacggagattatagtaaaattcttcccgattttattgataagagcctgaaagctccttgaactgattttacatcattgccagcaatatcatctgtccggcgaggatgcgcaggaacatcgtcagcggataaaccgtagagtaacctaccgacggagcgtcattgcccgatgcctggttggaatatgccaatgcgggtgggtcggtgttgctgccggcaatcagtcccatcagcgtgaaataattgaccttgcaatagaaccgggcaatcataccgattatcagcaacgggatggtggtaatcaggaaaccgtagcctacatacgccagaccgcttccttccacgaccgtctgtacaaaatgctcacctgcctctatgcctacgctggcaaggaaaagtacgatacctatttcgcgcagcatcaggttggcactcatggtggtatacgttacaagatgcatcttatgtccgaaacgtccgataaggatggctaccaccagcggaccgcctgccagacctaatttcaccggtgtcggcatacccggaaatgcgatgggaaggctgcctaacagaatgccgaggaagataccgacgaagatggtaacgatgttcggcgtatccagacgcttcaactggttgcccagtacaccggccacacgctccaccgcatcctgctggcctacaaccattacacggtcacctacctggagcaccaggttgggatcggcaaacaggtccatacccgaacggttgatacgtgtcacgttaactccgtacatactgcggaagtgcatgcttccaagtttttttccgttgatttccgatttggtcaccagaatacggcgtgagaccatcggagtgtcctgcttctcccagtccacttgaatttcccttccgataaaggcggtaaccgcttcggcgtcttcctcggaacatacgatgaacaactggtcgccgatgtggaattccgtatcctggtttggaatgctgacgtgaccttcgtgacggatacgcgagcatacgaaagaacgtcccagaaaatccttcacctgaatcagctttttgccgtcgatagcctcattgcgtacttccagatgcagcatatgcggcatgtgcttcatatccgtttcttgcgtgttaagctcctcttcttcttttttcaggttgatgcggcagatgtaacgcacggcgataatagagccgatgatgccgaccacaccgagcgggtaggcgcaggcatatcccaatgcgatggggtctcccgtataattcagctggttcaacgcttcctgagctgcacccagaccgggagtgttggttacggcaccgtacagaatgcctactatcatcggcaggtctatatttccatcgatgaaataaatgcccagtgcgaccactatgttcagtgccacaatgcccacggcaagcatgttcagcgtcataccccctttcttgaaagaggagaagaacgacggccctacctgcagaccgatgcagaatacaaataaaatcaaaccaaattcgcggatgaaatgtaggatgtgtatttcacctgtaaatccgaaatgtcccatcaggataccggtaaagaggacaaacgtcactcccaacgatactccgaaaactttaatcttgcccagcagcacccccacggatataacgaatgcgtacaggcaaacgatatgtgcgacggatgtcgggtcccaaagaagactttctaaccaattcatagtaccttatttattgctttttaaaattttgcgcaaaattacttaataaaggggagctggcaaagggttttcttttctttttgtaataccagctttgcaaaagcaaggtatctatggagggatgccgggaataaggatggacatagtgttatccgtaagtgcaattttccctaaaaaacctttttgtttgaagtatttccttatatttgcaagtctattgatgacaaaatgaatactattcatctattttaattttaaataaactatggcagacagtaaagaaaaactcttctcggacttttctccggtttctacggaacagtggatggagaaagtaaccgcagacttaaagggtgcggactttgagaaaaagctcgtttggaggacgaatgagggattcaaggtaaaacctttctatcgtatggaagaccttgaaggtttaaagaccacggatgctcttcccggtgagttcccttatcttagaggtacaaagaaaaacaataatgagtggttcgtccgtcaggaaataaaggtggaatctcccgaagcagccaatgccaaggcgttggacattttgaacaagggtgtcgattcgctctctttccatgtgaaagccaaagaactgagtgcggagtatatcgaaactttgctgaaagacatctgtgcggagtgcatagagttgaatttctccacctgtcagggacacgtggtggaattggcacaacttctggtcggttatttccagaagaaagattatgacctcacgaagttgcaaggctccattaactacgattatttcaacaagatgcttgccaaaggcaaggaaaagggcgatatggtggctactgccaaggctttgattgaagctaccgccatgcttccgaaataccgtgtcctgaacgtgaatgcgctgacgttgaacaatgccggtgcatatatctatcaggaactgggctacgcgctggcttggggtaatgaatacatgaaccagctgaccgatgccggactgccggcagctttggtagccaagaagataaagtttaatttcggtatcagttccaattacttccttgaaatagcaaaattccgcgctgcccgtatgttgtgggccaatatcgtggcttcctataatccggaatgcctgcgcgactgcgaaaacaagggcgaacacaacgaatgccgctgtgctgccaagatgagaatacatgcggaaacgtccactttcaaccttactttgttcgatgcgcacgtaaacctgttgcgtacgcagaccgaggctatgagtgccgctcttgcaggcgtcgactccatgacggttgttccgttcgacaagacgtatgccgttcccgatgaattctccgaacgtctggcacgcaaccagcagctgctcctgaaagaggaatcgcatttcgacaaggttatcgacccggctgccggttcttactacatcgagaacctgactgtggctattgccaagcaggcttgggagctgttccttgcagtggaagaagacggaggtttctacgcatccgtaaaatccggcaagatacaggctgccgtgaacgagagcaatacggcccgccatgcagccgttgccaagcgtaaggaagtgctgttgggtactaaccagttcccgaacttcaacgagaaggcgggcgacaagaaaccgttggaagcttcttgctgctgcggcggacacagtacttgcgaaaaggatgttccgtcactgaacttcgaccgtgcagccagcgaatttgaagcgttgcgtctggaaacggaagcgtccggcaagcgtcccaaagcatttatgctgactatcggcaacctggctatgcgtcaggcacgtgcccaatactcttgtaacttcctggcctgtgccggatatgaagttgttgacaacctcggtttcccgaccgtagaggaaggggtggaagctgcaatggcggctaaagccgatattgtggttctctgttcgagcgatgatgaatatgcggaatatgcaattcccgctttcaaggccttgaacggccgcgccatgttcatcgtagccggcgctcccgcttgcatggacgagctgaaagcggcaggtatcgagaactttatccatgttcgtgtcaacgttctggaaacattaaaggaattcaacgctaaacttttgaagtaagatgagaaaagattttaaaaacttagatatatatgccgctttccagcccgccaatggtgctgagtggcaaaaggctaacggcatcaaagccgactggaagactccggaacacattgaagtgaagcctgtttacaccaaagaagacctcgaaggtatggaacacctcgactatgcggcaggtatcccgccttatctgcgcggtccgtactctgtaatgtacaccttgcgtccgtggactatccgccagtatgctgggttctctactgccgaggagtccaatgctttctatcgccgtaacctggcctccggacagaaaggtctgtccgtggcattcgacctggctacccaccgcggctacgaccccgaccacgaacgtgtggtaggcgacgttggtaaggcaggtgtgtccatctgttcactggaaaacatgaaggtgctcttcgacggtattcccttgaacaagatgtccgtatccatgaccatgaacggtgcggtgcttcctatcatggcattctacatcaatgccggtctggagcaaggcgccaagttggaagaaatggcgggtactatccagaacgatatcctgaaggagttcatggtgcgtaacacctatatctatccgcctgcattctccatgaagattatctccgatatctttgaatacacatctcagaagatgcctaagttcaactctatctctatctccggttaccatatgcaggaagccggcgccacagcggacatcgagttggcttacaccctggccgacggtctggaatatcttcgtgcaggtgttgccgcaggtatcgacatcgacgcattcgcaccgcgtctgtcattcttctgggctatcggcaccaaccacttcatggagatagccaagatgcgtgccgcacgtatgttgtgggcgaagattgtgaaacagttcaacccgaaaaacccgaaatcactcgcattgcgtacgcactcccagacttccggctggtcgctgaccgagcaggacccgttcaacaacgtgggccgtacctgtatcgaggctatggctgccgctttgggacatacccaatccttgcacaccaacgctttggacgaggctatcgcattgcctaccgatttctctgcgcgtattgcacgtaatacgcagatttatattcaggaagaaacttacatctgcaagaatgtcgacccgtggggcggttcttactatgtagagtctctgaccaatgagcttgcgcacaaggcttgggagctgattcaggaaatcgagaagctgggcggtatggcgaaggccatcgaaaccggtatccccaagatgcgtatcgaagaggctgccgcacgcacgcaggcacgtatcgacagtggttcgcagactattgtgggtgtaaacaaatatcgtctggagaaagaagctcctattgatattcttgagattgacaatacggctgtccgccaggaacagatccagaacctgaagatattgaaggaaggccgtgatgaggctgccgtgcagaaagcactcgatgccatcaccaaatgtgtggagacgaaggaaggcaacctgctggaactggcagtggaagcagcacgtgtccgtgccacattgggcgagatttcgtatgcttgcgaaaaagttgtaggacgttataaagcagtaatcagaactatttcaggcgtgtattcatcagaaagtaagaacgacagcgacttccacagagcttgtgagttggctgagaaatttgcgaagaaagagggacgtcagccccgtatcatggtagctaaaatgggtcaggacggtcacgaccgcggcgccaaagtggtggcaacgggttatgccgactgcggtttcgacgtagatatgggacctctgttccagactcctgccgaagctgcccgcgaagcggtggaaaacgacgttcacgtagtgggtgtttcttcattggctgccggacacaagacattggttccgcagattattgaagaactcaagaagttgggccgtgaggatattgtagtgattgcaggcggtgtgattcccgcacaggactatgatttcctttataaggccggcgtagctgccatctttggtccgggtactccggtggcaaaggctgcttgccagattcttgaaatcctgttggatgaggaataatccgcaacgataaatgttaaaaaaaggacggtatgcgtttgcatatccgtccttttttcttaatctgtgttataaaacatactttttttcttggataatttgcagatttagcaaatgtccgtatctttgcaatgtgtttttcatagtattagatttaaggttaacaaaggttggagtacagcggtactcctttttttatgcccgtacgtcaaggatgaacttagggggagaggttatgaaatcaatgattatcaatcattatcaatcgttcaaggtcttatgatactgagctttctttatcaccagtttgctttcaccggaaatttgttgcgacacaattgtgaaacggatacgcgtcagctttttccggttccaggagtggattaatttcggatcggtcagttcgacggtatccgttgcgggcgataagagctttttatcgtattccactttgaacctacccgcctctcctgtcagtataatgtttttgttgcggtcgatttcgacttcgcagcaggtcatcaggtttaatacactcggttcgttgcatgccgaaagtttccatttgtcggtgattgtgaaatcctttttcctgtgcagcgtatagttgcgaatccagctttttacatttgcttcctgcggataggcacgggcaatgtccacctggtaggatacggttttggcggtggctttgtattgctggctgtgtgcggcaaactcccggccgttcttctgcggggttccgttgatgaggggcaggttgtgataatcggactgcatggtccatatcgtgtaccgctccggtccgaaggtctgtcgggtataagtacctacgcctgcatcgataagcactggcagggcattgtagtaaaggatgcacgcccccacatcgttgtggttatggctttcctgattgtttccgcctttcgctgcgaagaagaagccgtcgcttttgccttcggtgtcgcgtgccacgcagatttgggtgtctttaaaccaataagtgccggtaagcggttcgccttgcggatggccgatgatatctttgtacataaaaagctcgtccagggcagaagcgaaatatccgtttaccccgtccttgaaactttggttttgctgtgccatgaatgaggcaaatttcatcatggcggggtctccggtcagttcgccgtaccggtagaggatacccgggcttggacttactttgggtgcggagtcggcgaagtttacaaaatagttgccgccgatgtgtacccggtaaatgtattgcgccatattacgcaagaggggagcgttgaatatgttcaccttgtttccggttgctttagccagcaaatccagaaacttcagggcatagccggaagccccgctccaataggtgggaccctcgtcgcaggctccgtcctcgtgatacatgctgaaaaagaaatcagtggatttcatcagcttccagactccttgccgcacacgttccgggtctttctctatcagcatcagggcttgcagcacgttgtagttaatccacggattccagttatttacctgctggtcgccgaatcccatccaccagtaatcatcccgtgcgaagtaggggtttatcaggtttctgttgacttcctcgataatccgttcgttaatcagcgggctcaccttgtcgaattcgtctttcaggaaatagtaagtccatgccatttgcgcgccgatgtcggccactaccagttcgatggtcggttcattcctgtcgggcagtccggagcggtctttctgaaagccgaggtgtgccgagtgtatccaggacgtctcgcacagaaaccatacaccgtctatgatggcatccataaatctgccttgtccctctaccagttctgcgagggtcaaggcttgcagggctttgtggttggcgcgtccggtgcggatttcgccggtgcgcttaaaggcaaggtagtcggaggcaaggtccggtttccattcgtgtttcagggcgcgttcgccgttcctgatgataagctccctcatttcgggggctgttttctctttccaggatttacggtcggtataggcgggatagtccacccagctttgccggtagcggagtacattgcccaattcctcataggaaacggtctgttcaagaagatgcctttcggttgcgtgggcgggaaaattgatacagacagttgcgatacataatgaacttgccagtaacaggctttttatttttgacatttgcggaatgtattctttaccctttatttttcaaatcgatgtatctttttaatgcttccatatagtagtaatccgcgtagttcagcggtacgtctatttcagagccatgcggcagtgagccggtggaatgcatcagcacgtaaccttgattgctgcctttggctgccagatatttcggaccggacaagtttttcaggattgtttcggcatagtcggaatattttttgccgtcgggtgcaaatgtgctgagctccaggaaagccgatgccgtgacagccgcggcagacgcatcacgcggagtcttttcacctgccggggcatcatagtcccagtaaggaatcaggtcgtccgtctttacacgttccataatcatgtctgcaatgtgaacggcttcctgcaggaaagccgtgtcccgggtttcgcgatagcaggaagtatagccgtatactccccacgcttggccgcgcgaccaggccgattctgcatttttaccctggtgtgtctgtttgatttccacgcttccgtcattgttatagctgaccacgtgataggaggtgtagtccggacggaagtggtttttcatagtggtttgtgcatgctttacagccacattcttatacttctcatctcctgtcagcttatatacgttgaacagcaggtccaggttcatcatattgtcaatgattacggggaagttccacgcaccgaagtcccacgagcgtatacaaccgatttccgggttgaaacgggcgcacagattatccgctgtttctacgagtacggctttaatggtgtcgttaggggcgaggcggagggcattgccatagctgcaattcatcatgaagcccacgtcatgggtacctttcagctcacgtatcgggttcaggatgttggtatattcgatggcacgttttttcaactcttcatcgccggtcagttcataggcataccaaaggcttccggggaagaatccgctggtccagtcggcaatgccgcaaagacgtttttgtcctaattgcagggcttcgggattggggtgtaaagagtcgatgtatgctttgttctcgcgctgcagctgagtatcaagaaagtttacatcatagccggaatgtatggaacgtgggaacttgcttgttccggagagttcctcggcggttgatttcaactgataggaagcggcatcgagtgcgttgcttatccaggcttctttctggaccggagtgtttttgcagcctgtcatgcctatgagcagagcggttgcaagcaacagagagtttcttttcatgtcagtaagtatttagtgatttttgttcaccggcaaaaatatggatattcgtgaaatatcctatgcaggattgttgaaaggtgtttgggtgtagtttaaaggtatgttacttttgtcgaatactgttttaattctgtattttcttgggtgaaagcattacatttacctcttcaggctttttacctgaaagcctgtaaatagtgtgtggttttccaataggcggagtccgaaatatccgtctccctcattctttttaaccggcagtcggaacagctcctcgccgttgacactgtaagttgtgattcctttttccacacggattttgatgtcgtaccatttattgggaatcagcaagtgcgccttgtccgtatattctttgattacggggcgggctatggcatcactggtatccgccgctttggcaaagtactggcggaaacgggtagtggagttgtggtttccgccatatcccacataaaacaggcttagtgttttataatgttggaaaattccgtttcgccattcgctgcgtgcgaagagattgtcggggtattctgggtcattggcgccccaaaagcagttcaggtcgctaagacggtcgtattttccgccttgcatcagcatcttcacgcgatagccgatttcataatcaccggtaaggcgttggttgtaccaaagtgtaagaccgtcgggtgcggtaatttccagcgtatcgcttgatacaaggatttttacttttccggagtggtcttcgatggtccagttctttaaaacgacctgtgcctgaaccgtgaaaggaagtaacatcagtacacttcccaatagtaatttgtgaaaagagctttttgtcataaatattactttagtttacagttgatattcagatagtagttacaagtaacacataagatgaaatgcttcatgttgggtagtgattgtcatcttctttataatctgtatcttttcttttgacaaagataaccaaatatttataaatgatatattactttaattcctgaagctgtgttaggacgtggatatattgcctattttttcactctaaagctgaaagctaatgcttcattttttaatccttgtggcaatataactgttacttttccgttttcacaagtgtattttacctgtttcccgttttgcagtaatgtcattttgccacttggttcattaccttcccattcaatgcttgccggaagtttttctccttcgggaagcgcataaatggcatatagtgtttttctatccttattggcggtgaaccatacattgccataattgtagttgggagtgatacgggttgcataaatagcttttccgtttttccttagccattctcctatctgtttcaatcttatgattgcttcttcttcaatgacgccttcaccggtaggacctacgttcaaggctaggcagccgcctttagcagtaatttctgctaatgtattgataatccggttgacggatttgtatttaggagttgggttccaaccccatgaatttgccagtgtgatgcagctttcccatgggtgtgtctgttgtgttttgggtacatttagttccggtgtctgataattttcatttcttccgggaatcgttctgtctacggcaatcagtcccggttgttttttgcgtgcattatctacgatttcatccaatttgatgtcttgtcctttgtcctttctgacccaaccgccgtctaaccaaagaatatctattctgccatagtttgacatgagctcgtcaatttgattggcggtgtattgttgatatttagtccatttttcaggatatttttggatgtcatagtttggattacgggttggagtggaaagcgcaggatcccaataatattcacagtgccagtccggtttggaaaagtaagcaccaatcataaaaccttgttgacggaaagcattgaacagatgataggctacatttttgtatttcccgtttttataaggaccttgtgcaatgttataatctgtatatttagagtcgaacatacagaaaccgtcatgatgtttggtcgtaaatattaaatatttgaatccggcatctttcatgatggctgcccattccgtcggttcgaatttggtaggattaaaagattctgctaatccccaataccattttttgaagtcaccataagtggctcccgggagtatcttttttcggcggtcggtaaatctatcttctgagcataaagcccatgactctgagataccgggcaccgagtatattccccaatggaacatgataccgaatttaaggtcttgccattgttctaattttttcagcacttcaggatcggtgggccattcatattcttttgaaattccgtgtacgaatccatgttctttggtgataaagttgttttgtgcaaagagtgtaacagacagacaggttcctgcaattaaggataaaaatcttttcttcatcgtagataagtgttttttttgatatagattaataataatttatgtgcaaaagtaacgggaactttgtagaacgaagtgcgctagtgttgaaaggacttgcattattgccttgttctgttttgaatttgtttgattatatttcaaaaacgtctaatatcgattattattattttcatgactgagttttaaatatatatgggatatgttttgaaatcacattggtatagttatcattatgtgtattcttaccattttcccattgtctgtattctctggtcactcatttcctgagtttcccattttccattaatactatcaaacaggacagaagcgtctttctctttacacgaataagtctctccatttatttccggttttttgtttccataactgaatactgcattgttccggttattacggatgtacagacgccccggacgctttgcatccagttcggcttcgatagtccattcaccgcatcggaaagcattgccttctttcatgatttgtactgcctgcataccatcggcttcaacctgaataatggtaagtatgcggttgctcttgctcggtccgaagcttgcagtaagcgaccagggagcagtgaagtcctcaccacgctgggcgtctgcgtcattcggaggcgctgcaaatttatccgtctgggtaatagtcgctttttgcccactaaacagttgggcaacagaagtgaatcctttttctttgtttacggttgtgagcgtggctgtgactggatttatatcgaattttacaggactatgcagcaaccagtcccaatgtaccttttcactggcttccagttcgtcgtagataaccaccttgttgggatgcaacagaaaaatatgacggcggtatttcttcaatggcgtttcaccgaaaccgttttctggagtttgtgtcaggtgatacttcttgaaactgtttttccacaggcggatgtcactgatgccacagtatgccgccgaggcgtcccccaaggcataagagatattgtcgccgttgaacatgcgcacaatgtatccgtaggcatcgggcgtaaaaggttggccgataccgtttattagtagggtgttatgggcgcgggtattgcgataagacagcagattatgtggatcggaaaaattcatataatggcctacggcatggtaaaccgcttccccgccataatgcagattgaacgcattctgattggagtgcgtgtggttgcccgaaccgaaagggctggaacggaaacttaggctgacattcttttttaaatctctcaaattgctgttggctaccatttcaccgcaatctctgaaccagacagcctttggcgcatctgccggcagttcgcaatcggcaggacgttgcttgccggaggcaagacggtaaaggcgggtttcagattcggtattgtatcggttgttagcggctgaataccaggcggcatacgggtcattggtggtgcgggccagaaaatcggcaaaggcacttcggatacgcaaaggcttgccgttccttttttcgtgcccgtcgccgaatccggcacttaaggaacccggaagccaggtatacgcagtaccgattcctgcatttttataccagggatgttgcagaaaatcaaatccggtgagataactgaatagtgtgggaagataacacagactgacagcgttggcgctgaaatagttggcgccattgtgccatgccccgtcgcgattgaaacctgtacccggtccgcgtgtattccaaagttcataatagtattccaggtattcttttgcagcaggatatttgtcatacatcactaacgaggcttgtaagaaacggcgtatttcgaattgccagatgtgttcatcgaaaaacatattctcagtacgtcccaaaaggcggtccttataatagaagtccagtaccttcatcacaatttcttctatcctctggcgttcctgagccgtaaagcggtcataaaaattctcataagtagccgccaataagtagaccagttcgccagccttgaagtcgttgcccataaaattctttgtcggattctgtttcagcagacaacgtacgttggccagcattttctctacataaagattgtactgtaacatctgataggcagtgttcagtttatcaaagttttcagacatggcaaaaacatgcttgtacggttgcgtatcggtgctgaagtccatggcaagcgcactgcgggcatcgtcaatcatcacttcaaattccggattggaacgtacatttttccgtgcatcctccaaccggtcattcagaaagcaatagatacgcggactgtttttaggaatgttgttcaggaatacttcgaacggaggagttgcaaaccgtggagtgctttcttctacagtaaaactgtatgtcttgctccaaggcatctcttcaccggtcttgctgaccgaacggaaacgccagtaccagagtcctgtgtccaatattttatgcggattgaacatgcaccagggcactggcttggataatatgtcattgtcccctttaaagttcttgtcctgcgagaggttgaattgtagataatccgactgtttcatacttggcggtaccaataatggtgctgggttcaaatagataatattgtcttgttgcggatagggagcttttcgtaacggattattggcatatgcaggtattaacaacacgcataatatcccgattactgcgagtcttgttttcataatcttgaaattttattttttaatggtctactgacttttgatttttataacttatagtccaatattttctttactccatccagtgttacttccactttcaaagaatttttgttttcatgatatgcaattttaaatctttgtatgttaacaaagttacgtgataatagtagaaagccttgtcggtactgtttaagattttaatattgtggtttataatacttatactttcgtttaaagtacttttgattttgtttagtttgcaggatatatctcgcttttattcatgttgggtcggatatatctgttgtcagaggttgttagtttgaggaaatatatagatgaatcatgtgagcggttgcttcaggtgtgcctttttgttgaattccgagtcataaggcaggagatgagagttactaatggagtgaagtgaaatttgctcatcactcgtcacttttaatataatccattaaaaataagattgttatagagtgataataacgtgatgaggagtgatgactgaaagttagtcatcactccataaatatgaaatattataacttgacaattcgatacacaactcccttattggtatgtttaccttctatatcgttctttttcagtatccttccgaagtattttgcatacccttctgtcagcttcgttgtaccgttttttgcatgcagaatttccaaaatctgtatcggcgacatccattctccctcttccccttcttgtggtaaacggaaatgacaatggaacaactgttcaatcggactgatttgctcgaattcccggttattttctttcaaaacggcttcatccttgtcattaaaccagtatctttcaccgctgcgtatcgcttgcatggcttgtgcatacaactggcggtagtttatcgtcacgttcgtatcaatgggggcagtcacttccacacatacaaaacggcggctgccgctgctgtccgtcagcaggtctttgtggttgctcgtcccgatgaacgaggcataccgccttatctcctggatactgcttccgtagggcttgcgcaggttggcaacgggcttttgcagaaggtgtttcagaaagccttgctgatggatgctcacctggtcgaactcgtcgatattcaccagcagaaagcgccccaggtacatttccgcatcgcgtttgctgccaaaatccagactgtcggtatagccgaagcggagttcgggaggaaggatgatgcggcagaaagtggacttgcggtaaccctgtgcacctatcagtagcggtgatgtgctgttggcgtgcatcctgttgcccagtccgcgccaatgcgccaccatgttcagaaaccaacggtagaacagctcacgccaatacggattgttgcagggaacaagtccggcaagcgcacggatgcggtctttgccgtcccaacggcctacgccgcacaggtattcttccaccggattgtacagcggcacgcggttagaggtcaggtagcggttcacgtctctgtcccacacacgcaatccctcttgcagggcatccatagccacgctgttgcgcgctcgctggtccattacatgaaaatagaagtggatggagtcgcgttggcgatattccaaatcacccattagctggttgtaccggaattcgtaacggcgttccatgaactcgttcagtttcagcatcgtgtcctgttcgggagtcagtacggattttctgccgaatccccggcactcgcggtagagattgtgcagtgcggtgcgcaccgtctgttcgtctgcctgccgtcggtagtgcatcattacctgccggacggcttcctcttcggggataccgcttttgaagcattgctcgcctatggagatgagtagcgggtgaaaatcatcccggtcgcgctgccagttctccacttcgtccagcgcacgacccaggactgtttcaaacagcagagtgaaagtttgcgaggagtcgaatcccggctgcaaccgctttaaagggttgttttctgccaattttcgttggttgaatgtccgctcgccgggcatcgtcacgggttgttcgagacagaaaggcacggcatcgggagcaaagtaaggcgtttcgtccagcgtcatgcggaaagtatcggcaggcgagggctctttcaacgttacgggaaacggaagcaggggttggtaacattgtaccgccatgcggtaagcatgtgcatggaacaggctgatttcttcttcccgttgcggaagtttgccgttcggcaaggcaaacagcgcccatatcttcacgctccgtccgctgcttcctgcgaaagctgcataggtttggggaaggagtgccgcctgttctttcaccagttccgcttcggacatgccggacagtccgcctacctccagcagtacaataccgttgtagcgtttcatccgccgttcgccctcgcggctgcgtccgtactccatagcggggcatatgcggggaagcttgtcgatatgtccgtaggttccgccgctgccatggcttgtatattcgagcatggtgcgtaatgcactgacatgtccgggcttggtttccgacttgattttggtaataaatgcggctgtatcgcaggtgctgatactttccgtgcccgcgtcacggttttccttgataaaggttattctcattccggtgttggttgtttggaaaaatttagtggagataagagcgtttctcttagactctgcaagatacgcataaaacgggctggaagcaagcaaatccgcccttttgttttaagatttttgccagtatttatctccggaaataaatggaaataatcggaaaacaaaccgttgaaaacttgacttttcctgatggattttgtatctttacaaggtgtaaaaccccgttttgcaattgcgggccgaagagccttcatatgcgggccccacagcccgcagccggcaaccgccgggcctgcaactgcaaaacggggttttactgtaagcataacggcattttgcatggtccggacaaataaaaacaacgaagcaaaacgttgtttatcttccagcttttcccgaacggaccgcggagaatatccgaatttatgcggccgaatggcgtaagctaccgatacaacaggattttcaattattacataactaaaaaaaacagaacgacaatggcagcagagtatgatttccagagaaagcccaacccgaaaggagacggcgaattacaacccatgtatccccgcatcgtgaacaaggggactatcaccggcaaacgtctggtcagcgatatttcacaggcaaccagttttactcccggagacgtagagggagtgcttgcggcattggaaagccgcatttcctattacctttccgaagggcatcatgtacagttgggcaatatggggtatttttcggcgggactgacagcacgtcccgtcatggacaagaaggaaatccatgcgcagacgatatttttcggcaaggtgcatttccgcgtatcgcccggcttccggaaacagtgtgcaggatttgtggaacgtgtaagggcagggtatggcttccggcacagtgaggacatcagcggtgcggaacgttaccgcagactgtgcgcgtttttggatgcaaatccattcattacgcgcaaggattacagcggaattacgggacttttgaagaacaaggcgttgaatgacctcaatttactggtggagaaaggtattttaacaacattggggcaagggtcgcataaagtgtatgtaatggctataaatcaatgagttaaagtaatattgaggataaaaatttaaaaaaaacagtgacgaccggtattcggtcatcactgtcataacgcttcttataaccaattaataatcttgattataggcggttagctataaaaaaacgtgtgatgagagaataatcattaatagattattctatgattactgtaacacgataattttcagacattgcccgtacttcatattcatccgttttaataatggaagtggttgtgacatcagttacatccatttttttgttaggatcaaaagtcagtacatggaaagacccttttttaccgttcaaagcttttatatatatgttttgtactcctccttttgcatttggccaaatcatcttataggctcctgatgcatccggggttaattcattaccgtctttatcagtgacaatatagtctgttccgcatatcaggggtgttttgtcggaaatcgcagaagtataataatatacttcgggactatatgaacggacaaacttgctgtagaattgtgtaggtatggcaagtgtctctccttgctttactgtgtaagtaacatcattccctaccgggatagttccccatttttcaaaacaataatagtaaacatgagccaatgctgggtctccatcttcccattcttcatgcgatttatcacaactgcctaagaggcaacacattgtaaacagtagcaaaaaggatattttattttttaatgttttcatatcatttattcttttaatttattatttccaatatggattttgtttaatatttccattagatgtagcaatctcgtaacttggaataggatataaatagtcacgctgaggatcgaatttacgactgtcagcttcctctattacataaatattagcttgatcgtacactttcacttcgttgtaagcaccatttgcatctgtaaatttataacccagctctttggcagttttggcactttcatcgggattgaacagaatacccaacattgtttgggaaagtactttttctgctgttttccaacgaattatgtcatcatagtgtatgttttcatcaatgaattcgacaatacgctctcttcgaatttcgtctaacatgttcaattgatgatcagatacgaatccattagttagtttcgtattaaatccggaacgttttctaatatagttgacagtagcttccaattggtcatcactgatttttccattatattcataaagtgcttcagcatatgaaatcaagatttcggcataacgaatatgcattttatcaacggtttctttagaattagtatcatactcttcctgcatataccctttcttgatgggatacccatagccgctgtggtttacgttatcaaagggtaagtattccgcattcttgaaagatatttctttgtaggaaaatacggtcatttccaaacggggatcacgattactgaatatgtcatcaaaattggtttcttcttgataatgaaccgaaacttttctgggtaatccgtcgatgtataaaaagttatcaatcatttggcgtgttatggttgcttgtccggcttttgagctacattggttgtgccatgtaattgcattgttaactccatttggtccatacacttttacaaagatgttttctttattttggcgtccttcgccatcaaaataaaacaatttctggaagtcaggataaaggtcgtgtttattttccttaaacatagtctcagctgcatcgatagactttttcaagtgactttggctgtctccttccgttaaattgtgatacttgatataagtgccctcatagagtccgatacgtacaatcattgccagtgcagcagagcgggatacacgtccccagtttgcattatctgccagtttatcaatatcgggaagccattgtgctgcaaaatccaaatctttataacattgttgtatgacagcttcgcgtgaatccctgcctttctttatttctgggtcactggtattgttgaagactttcagaataagtggcacgtcgccatatttctttaccaagtcaaaataatagaaggcacgaaaaaaatgtgcttctgctaaccagcggttttttgtcgtttcgttgatatctatattctctcccttgacaatgatgttgttgcagacgcctatcttgttataaggatcagtccactctttatcagtttccgggatactgcgatttccggaagaaatctcatcgggagtatttcctattaattcttccgaacgcaaatcatgtcctctacccgttaagaagcccggcagatcaatatataaacgattacaagcacctctcaagtcggcctcacttctccaaaatttgacatcgcttaatgtcgtttccggttctctgtctaatgaacaactgctgactaatagagcaccgataagcagtaaaaatatatttttcatcgtagtgtatttttagaatgtaacatttaaacctaaagtccaactgcggaagaaaggatacatacctctgttggcgttgctttcgacttccggatccatcacttccagtatatcggaaatttcgaataaatcttgtccggttacataaacccttaatttttccatatacttcttagaaataggaattgtatatcctaatgttacatttttcaaacggaaataagatgcatcctgtatccatctgtcagctggtttagaattgaagtcatctcctttatattgataaagacgcggccaataggcattaggattttcttctgtccaataatcacggtgaatagtccagggcatttcagcgtcattggctatcggaaacattcttccattcaataccaggtcgcgttttcctactccctggaatatgagtgacaagtcaaaacctttccattgtgccgctaagtttataccatagaggaaacggggtgttgtgtttcctaacataaccaaatcaccggaatcttcggggctgccgtttcctactccaatcttatgatcaggttttccttgggcaacatattttacgtctccaccgctgataataccatcttggaatgattcatatcctggatgatcggctttatattgcaaatattcttcacggctggaccagaaaccatcggtttgatatccccagatagtattgataggatagccttccaacaattttacaacaccggcgtttactacgctggctccatcatattttaacagttcatttttgctatctgagatattgaaaccgatttgatagctgaagtctttaatttggtctctccagttgatattaaagtcccaaccccatgttttgagtttacctacattcatatttggaacattaattccgatctgatgaggcaattgaagtgcggataacatatcgttattaaacttccagtaatattcgaaactaccggttaggcggttattgagaagtccgaaatcaagtccgatattagtagtttctacggtttcccatgttttgtcttcagatgccatgctgctttggtaaagccatttttcaccttgatagcttgccggtatatctttctgtgaataggttatcaagggaatatagtcgtataatcccaaaacggctccattaccaagctgtccccaagacattctgagttttaaattgctgacccaatcaaggttaaaccacttttcttcgttaacacgccatgctgcagaaacagaaggaaaagctttccaacggtgtgagggggcaagacgtgaactgccgtcataacgtacattggcttccagcaaatatctttccttgaagttgtagtttatacgaccgaagtaagacatcatggcccaagtgtcaatctgatcggctaaaatgctattggtagctttggaggtatcataatagttgaaagagaaaaaatcattggatatcatgttgttggctgttcctttgatttgattcatccgataattttcgtatgaactacctgccaatatattaaagttgtgcttctcctttaggttgaaactataatttatggtagcttccagcaagtcgtggtattctttatattgagatttgtatagtgagttaggagaattggttgttctacgtacatcacctacataattataataagtcaatgttctcttataactctcctgatgatagtatccggcacggcgcgaagcgcttaaattgatgcgtagattcttgataaaatccttgatagtcaattgtgctttacctgtatatgactcgtattcagttgatttttccccaccgtttttcataatatcaataggattatcttgtaagtcgccattataagggctgggataattctctgcttccggttggtaaatgggttgccggccacggttttcatataacagtctgaagatttctcctgcaccgaaagagttttcggacatgtcatcggcattatattgtacattaactcctaagtcaacatatttattgagtttagcatttaatttggctaataaattgtatcgttcatagtcgtccggaccatatttcaataaaccgtttttatagtaatagttggcagataacatgtaatttattttatctgttccgccactgaccgatacggaatgattgtgctgcagagtactgtttttaagaccttcgcctaaccagtctacgctgtcgaacaagtcccaacgtccattgcctaatggacgataattgaagttgggattgccaatccatgatgatttctcggcattccactccgggccaccccttggaattctcgtcctattaatgaaatcttgttcttcccatgcaggaacacgttccggcatattaccaggaatattgaatgatacataaccattgtatgagattttgggctttccttccgtaccgtttttggttgtaaccaaaattacacctgctgctgcccgtgctccataaatagcgcaggatgctgcatccttcaatacggaaatagattcgatgtcatcagcatttaacatggacatatcaccctctactccatcaattaataccaaagctttagtatcgttgacagaagagtaacctcgaatttgaactccggttccttccgcacccggttgtccgccaccgcgtgtaatggtaacaccgggcatttctccttgtaatgcagaaaggacatcggtagaaggcttacttgcaatctgctctccttcaattgctgatacagaacctgacaagttaacctttttctgggttccatatcccacaactacaacttcgtctaacagctcagtatcttctttcaatgtaataataaactcgtttttaccttttactggaatttcttgagttgtatatccgataaaagatacgacaagtattccattttcaggagcgtcaaaactaaattttccgtccatatcggtaatgctaccaatggtagttccttttatggatacattagcaccgacaacaggaccgaaattgtcatttaccacgcctgagattcttctgttctgcaagatgctctcaacggattccgtttctctcactaaggtagacttatttgttgttgcataactgtgaatgcaacaagcactagtcaataacgaaagcattagcattcgtttcatgtgattttttttgtttttcataatactttaattaaaaaatgcttctttcatgttatacagtttaaaaaatacatattcaataagtgaccccaaaaaagggtttcgtctatagagtacgctttaattagtaaaagcttgctattttattttaccggtaatttgtgcgggacagtcttgcatttcccgcacttcccatactccgttaaaactgtcgtataatacggaagactgtttctctttgcgttcatatacctttccgttgattaccggtttttcctttccgtaactgaaggtggtttctgtttcattattccggatgtagaggcttgccggacgtcgggcattcagttccgcttcaatcttccagtcgccgcattggaaactgttgttgttgccgcgttctatctctattatccggttaccgtctgcctccacctggatgatggtgaggatacgattggccttacaaggttcatagctggccgtcagcgaccagggagctgtgaaatcttcaccgcgtacgcctattttcttgttgggttcggctgcaaatttatccgtttggccgatagtacatttctgttcgctgaacaggcgggcgacagaggtatatttactctttttgttacgggtggtcagggtcgatgtcgcctcgtctatttcgaattttaccgggctgtgcagcagccaatcccagctgaccgccttgtcggcttcaagctcgtcatagataaccacaatattgggatgcagcaggaatatatgacggcggtatttcttcaggggagtttctccaaagccgttttcccgcgactgttcaagtttatgattggcgaagtttttctgccacatggggtattcgctgatgccgcaataggcgttggatgcatctcccagggcatatgatatatgctctccgttgaacatgcgtactatgtttccgtatgcacgcgtggtgaatggctggccgataccgtcaaccagcagggtgttgtgggcgcgtgtatggcggtaggacaacagattgtgcggatcggaaaagttcatataatggcctactgcatgatagatggctttgccgccgtagtgcaggttgaaggcgttttgattggaatgtgtgtggctgccggaaccgaacgggctggaacggaagctgaggctgatattgtgtttatagtctttcagattgctgttggctatcatctcaccggtatccttaaaccatacggctttgggggcatttgagggtaattcagcctttcgggggcgttgcaggctgcatgccatgcggaacagacgtgtttcggattccgttttgtaacggttgttgatggacgaataccaggctgcataggggtctccggtagtacgtgccatgaagtcggcaaaagcgctgcgaatgcgcaggggcttgccgttgttcttctcatgtccgtcgccgaaaccggcgctcaacgaacggggctgccaactgtatagcatgccaagaccggcatttttataccagggatgttgcataaagtctgtcttcgtaagataaccgaacaaagtggggacataagccagggtaacggcgttggcgctgaaatagcttgtgccgttgtgccatgagccgtcgcggttgaaaccggatgccggagcacgcgccgtccacaattcgtagctgtattccaggtattctttggcaagcggatatttatcgtacatcactaatgccgcttgcatgaaatggcgaaatgcgaactgccagaagtgattgtcgaagatgtgggtttcttcgtttcctatcatgtgtttcttgtaatagagcgaaaggatgtccatgatgatgccttctatctgtttgcgctcttgcggtgtgaatcggtcatgacaattttcataagtgcatgccagtgtataaatcaattctcctgcgttgaaatcgttgttgatgactttcgggtcgggttctacggccagcaggcaacgtacgttctgtaccatcttttctgcgtatacgtccagttgcagcatttggtaggctgtattcagattgtcgcattcggcagccatacgggtgatttgcctgtatggtttggtatcattggtatagtttgaactgagtgcattgcgtgagtcgtcaatcatgttctcgaattcgggatgggagcgtacgttcttgcgtgctttctccagattatcgttcagaaaacaatagatgcggggatacgttttggggacattacttagaaagacatcggcttcgggagtgacaaattgaggaacaccgtccgttacggtaaaactgtaggttctgctccagggaaattctttgccttctttgcttacagagcgcacgcgccaataccatgtaccgttttccagtatcttatgcggattgaacatgcaccagggtttgggttgagataaaacagtgcttgcatccgaaaagtctttgcttctggaaaggttgaattgcagatagtctgattgcctggtgctttggggaaccaatagcggtgtgggatttatatataaagtgtgtccgtgctgcggatacggggtttcccgtacattttcgtgtatgcgactgacatttccagcctgtgcagtaatcagtgtcaggcagaatgccatgagaataaaaagctgtcttttcataattatattggtcttaaaatgattcgaagctaaccgatgcaaaggtatcgggttggaatgaaaacagcttataatggcgtagagcaaattgttgcttgcgtataaagtgcttgcatttctgtacaaaacactttcaaatttgtataagtaaataaaagaatgtgtgtcaaaactaaaatctgcttactatttgttttttttaggcacggattacacggaaaacacggattcacagattttctttattctttttctgtgaaatccgtgtaattcgtgcctaaaagaaatcgtcaagtgtattttgacacatccccttttaagattcgtatgttaagtatgtccggataactatttcccgtattccgacggcaggcagccgaagtatttcttaaagctggttgcgaaataggacggggtgttgaaaccgaccattccactgatttcggatacggtatgccggccttcctgtaatagtttgcatgcctggttaaagcgcattttacggataaaatcgttggttgattctccagtcagtgctttcatcttgatgtgcaggttggaacggctcatgcacatttcacgtgcgaagtcgttggtagagaattccacattgtccaggtttttctctacaatggccattgcctttttcaatagttcttcatccaacggattgagcgctactttttcgggctctatttccaaagagtgcgaataatgctcaatagcccggtggcgcgtacggaacaggttcttgattttcgcagcaaccattgccattgagaaaggtttggggatatagtcgtccgcacccacctgtaatccttccaactgctctttcaaatcggttttggcagagagtatgatgaccggtatatgacaggtacggagactctgttttatctgtttgcataactgcaacccgtccatgacaggcatcatgacatcggtcagtataaggtctgtatcctgttcctttaggatggccaatgcttcctcaccgttgcttgcctgcaatatatgataacttttgcccaattcttcacagaggtattggcggatatcggtattgtcctctgcaatcagaatggtttcttggcgttgttcctctttgactgttgtctcttccgtgatttcttcctcttccgtgtcgataacatacatattccggtcgttggtggtgtagactcgctgctcttctgtggagtcgggtgctgtctgtctctcttccggaagatatgccgactcttctgtcgggagatagacggagaaagtgcttccggcaccttcttcgctttccagttcgatgcgtccgtggtgcaggtcgacaagccgttgcaccaatgacaatccgataccactgcctaaatgctcgttgtctatctggtagaagcgttcgaatattttgccttgtttgtcgaaaggaatgccgtctcccgtatctttgacctggagaagcaattcatggttctcttctttcaatgtaacggtgatgcttttgccttcaccggtatatttaaaggcattggacagcaggttgtttacgataagctccatgtaatccgggtcgcatagaatctcacgcccttccgcgttggagtggaggttgtaggctatctgcttgcgttgtgccagacgttcgtagaacgagaaatctttttcgattacgttatgtatgggattgggcctgactttcagattgaatacgcccagttcggcacggcggtagtccattagctgattaaccagatgcagcaggcggttggtgtttttttgtacatattccaactgtttgtgtagccagcggtcgcttactttatccagcatttcctgtaccggagccagaataagggtaagcggagtacgcaattcatgggaaatgttgatgaaaaagcgcagtttcatttcattcacctctttctgacgctctttatccatacgttccattttcagctgcgcttccatgcttttgcgcatccggaagtagcggaatataaagactgtgacggaaacaaaagcggtggcgaatagcagggaggcccaccatgtcttgtaccagacgggtagtaccacgatttccagttcggtaggtgtctcattccatttgccgtcgctgttggcggcttttacaaggaaatgataagttcctgccggcaggttggaataagatacggtacgtaggacattggaatagtaccaatcccggtcatagcctttcagcatataggcaaatgtgttctgattgcccgatatatagtttgacacgacaaaatcaagcgaaaacatggattgcttgctcgataatgtgatgctcttcgtattgctgatgctgttctgtagtattccggtgccgtcgttggggaaaaccgtctgattgaacagatgcaattttgtgataaggaccggaggagtatagggattgtctactatttgttccgggtggaatgtggtaatgccgttgatgccgccgaagtacatttgtccttctgcggtccggtaataggcattgttggtaaactggttgctttgcagtccgtcattgttggtgtagttgcggaatttttcggtttcgggatgaaaacaactcagtcctttgttggtgctcagccacagtttgccgtactcgtcttccaatattccatggatgacgttattgggaagtccgtcggcaacggtatattgcttatattctttccgggcttcgtcaaaacggaaaagtccgcttcgtgttcctatccagaaaattccgttatacgcttcgtaaatgacattgatagctttatgttttatggggcatgcctttggcaatagggggcataccgatagtccgttttcatgttccgtatatatgtccagtcccttttctccgctcagccaaagacgttgtttgctgtcgcgcaggatatatttgaattcgtccagacctaaaggctgtccgttgctcagggaggtaacgggagtgaatgtcttttgccggggattgaaacgtagaagatccgacatgccggtcagccataaatcaccgttgacagccggttctatatcgtacagatttctcgtttccctgctattgaacgtttcgatacggccggaattgcggtgcaggatactgagtccgccggtatgagtaccgatatagaccagattctgggtatcatctatatatatggcttttatgtcattggaagccagtccttctttctgcgtgtaatttgtaatttgatgtgtttgcgggttgtagtagtttatgccgccgttgttggtacctatccaaagtcctttttgggagtcctctttaatacattcaatggtattgtggctcagcaaactcccttttgttacaggcaggatgctatgaaaacggttcttcaacgggtgataatagtttaacccaccgtagtatgtgcctaaccacattcctttttgagagtccataaagatgtcacggacggatgtttgtgaaaggctgccgttgatttccgaattgctggtatagttgtcgaaagaatcggttgcttcattgtagatgttcaaagaattgatgctgcctatccataggacgttttgggaatcgagtgtcagtgagcggatgtagttggaactgatgcttcctttttttccgggaatatggacgtagttggttatttctttgctttgcgggttgattttgtacagtccgtttccctctgttcctatccacaggcagattggggattgttgcagaatggcgagaatctgtttgccttgcagttcatcaggcattatatgttcaagggtgttgtgtggaatcgagtagatgaatattccttgataacttcctatgtatatattgtctccttgtctggagatggttgtgggagacacggatgagagcgaaggatgcaggggagcgtttgagaaccggcgggtttcggtatcaaaaagcagaagttgcttgtcattaccgtcggtgaacagaaataaccggtgttcatcgacttccacgatattggtaattggtgtgttctttttatttttctgataggtataattatagaatttatcctgttctgcatcatagagtgacaacccttcttgtgtgcctgcccatagccgtccttgcgaatcggttgtgcataccctgattatattgctgccgatgctgtatggattctgttcgtcattttggtatacggtaaaatcgtaaccgtcgtatctgttcagtccgtcgtaagtggcaaaccacatattgccctgcttatcctgagtgatgtcgaaaactgtattttgcgacagtccttcgtttactccgaggtgaataaaatttatgcggttggcaatttgagcatgaagtggagatatgaatgtccaaagcaatgcgagtaatagaacgggtttcatcatggtttattaacgcgtaaggttgttcttatacaacaaagatacgaataaatcttcatttttaccggagattttgtaaaaatgaagatttattatcaagcggaatgcagtatcatcagtatgcgattgtttcgtctgttgctgtcagcgggttatacgggtggatgcaggctggtagtctgcttgttccgtaacggtgtagtccccgtttaccttgtcgtagagtatggaagcgtccggacaggcaggcatgtagggttgtccgttcaggacaggagatgtatctccgtagtggaaagaggatttcttcatgctgtgcgtcacgtttagcatggcaggcgaggatgcgtctaattctgcttctatggtccaatgaccgcaagtcaggatattccccatttggtgtattggggtaggagtgtcattgtcggtttttatctggatgatagcaaggatacgtactttttcttttccatcaatacaagccgtcagatgccactggttaggataggtggtatcggacgaactggcgggtggtacagtaaaacggtcggtctgcgacagggttatctgttcattgctgaacaggctggtggtggcggtgaaaactttctctgtgttacaagtggttactgtttgcaggttgttgtcgatactgaacttggtggggctgtgcaacaaccaatcccaccgtgcggtttctttggcttccagttcgtcgtagagtactacgatgtcgggatgcagcatcagtacgtgccgacggtatcgggtgagtggtgtgggtccgaaaccattttcgggcgtttgcgtgatgccggcggcttcgaaggcagatacccacatgggatccttgctgattccggaataggctttcgaagcatctcccagacaataggaaatgtgttcgccacccatggcacgtacaatgcagccgtatccttcggtggagaaaggctgcccgatgccgttgaccagtatcgtgttatgggcgcgggtatgacggtaagacatcaggttgtgggcatccgagaagcttgtgtaataaccgctgctacggtagacatccgtgccacggtacagcagattgaaagcattctggttggacacggtgtggcttcccgaaccgaatgtgctggaacggaatgccagagccagatcgttttccgtatcggtgagattgctgtgtatggctacttcacctgcatctttgtaccagacgagtttcggcgtgtcttccggcaattgtgtgctatagccgatgtggctgcttgccatgcggtagagccgcatatcggaatcgcggaccagtgtttttgccgcttgttgtgcataccagcccgcatatccgtcgcctgcctcgcgtgcaaggaagtcggcaaaggcggcatattggtaggttgccgcagtgtatttttcactaccgtcgccgaaaccgatgtttttgctttcgggcgggcaggtaaaggcgagcgactgtccggcattccgataccagggatgcaatagaaagtctttgtgtgtgatgtacgaaaggagcatcggcatgtagaacagggtacgtgcgttgttgttgaaatatcccgttccgttgtgccatactccgtcccggttgaatcctgaagccggagcgcgggcggtccataattcgtagtagtactccatgattggcagcacttcgcttttgtagttgtcattgtcgtatagcagaaaagcagcctgaaagagtatacggagattttgttgccaaaagtggttgtcgaagatatgattttcctgaatgccgcactgttgcggatagtagtgatgcagtacacgcatcaataacttttctgtattctggcgttcttcggcagacagccggttatagagcaggtcataaggtttgagaaaacagaaagcgatgtcggtactcctgaaattgtcggcaaacagggtggcgtcgcttgccggagtatcggttaacagttgcagcagttcatgcagtcgttgggcatatttttcctgttgtgtcaggtagtatgcctggtaaaggtcttggatgtatttctttaggtctccgatttggtcgtaagggttgacgatagttgtcaggtcggcatcgacggcattgtcggcattacctgtcagccgttggtattcgctatgtgaggttacttcttgccgggctgtctggatacggtcgtccagaaaacaatagaggcgggggtaggtgtgaggggcgtttttttgaaatgtatcgaaagggggagtgacaaaaacgggagtggtttctttcacttcaaatgtgtagctttcgctccatgtctcttcagtgccgtcggcagtgatgttgcggaaacgccagtaccatgttccgtttgccaactgtttatgggggttgaacatacaccattctacaggttcggaaatgagtgtttcgggggtatcgaagttctggctgcgtgaaagggagaattgcagttttacaccggttttcatggcctgcggcacaatgaggggagcggggttcagataaagttcgttgtctgcttttgggtaaggctgctcccgaatcttgtcatggtaggcatcgggcatttcggaactgtcggtaccgtcggtggcaggcagtttgggcattgcgtcgtcatggcaggcactgaatatcagtagggcggtagaaagactgactaatagttgcagacaggaacttgttttcataatggtagattctaagttgttgcagatactttgggaatagtggcttgtatgctggaaagaatgagaggttgtgtcaaaatgctgacacagcctttttttatgcgcaaagcccagactttctcaagcccgggctttgttattacccaaagttttcgtatctttaggcataaagtttttcgttatggcaaagttacattttcgtccttacattcccaaccaaaccgttctttttccacaaagaattgatgaaaacatagctgcgaacgacccggttcgcatcgtgaatgctgttattgacaacctcaatcttgagagtttcaagaagctttataaggaaacgggccgttgtccttatcatcctaaaatgatgcttaaggtgataatctacgcctacatgaataatatctattcttgccgtaaaatagagaagcacctccttcgtgacattcattatatttggcttgccggtaatgagcatccggattttatcacgatcaaccgttttcgtaaccgtgtaaaggaggaaataaataatgtatttacccagttggttcttgtccttgccgataaaggcttcatcagccttgatgtggagtatatcgacggtactaagattgaatccaaagccaacaaatatacttttgtctggcgcaagacagtcgaacggaaccgtacgagactaatggataaaatccgtattctcttggagcaggtggatgaaaccattgcacaggagaactctataaaagacacatccgtggagtttacttcctgcaagctctctgacatagtggatgaacttaaagaagccctggaacgccagcctgcaacaaaggataaggaagaaaagaaagctctgcgcaaaaagaagaagcaggtcagggaacttgaagggtatcgtgacaagctgatagaatatgacaatcaccttgatacccttggagaacgtaactcctattccaagaccgatcctggtgccacattcatgcgcatgaaagaagatgccatgaagaacgggcagaccaaacccggatataatctgcaaataggtactgaaaaccaatttatcacagacttctgtctgtttcccaaccctaccgatacactgaccctcataccttttttccactctttccagtaccgctataaccgtttaccgaatatctgcgtggcagactccggttacggttcggaagaaaattaccggttcatgcaggagaatgggatagaagccttcatcaagtacaattacttccataaaaaacagcgtccccgttatactcccaacccgttccatgccgaaagtctccattacaatgagggggaggattattacgtttgtcctatgggacagcacatgaaccgtataggaaccaaacgtgacaagacagcgagtggatacatcaccgaaagtgcccggtataaagcaaaaagatgcgaaggttgccctttgcgtggcagttgttttaaagctcgggggaaccgtattatagaagtcaaccaccgattaaatcaatacaaacggcaggcacgggaaagattgctctcagaagaaggtatcaagcatagaggcaggaggtgtatagaaccagaagctgtgtttggacaaatgaaatacaacatggcatacagaagattccggcatgtgggagaagacaaggttacaatggactttgctttctttgctatagcctttaatatcaaaaaaatgtgtgctaaactgataaaagaaggaaaggggctcattacagttgccaaatatatgtttatgggactatttataacccgatataattggaatatagcaacttgttgccaaatgcatgaggaaaaagtagcatagccaaaagaaaatatagcagaacttaaaatataaatgaggttgtgccaacgttttgacacaacctcttttttatgactgctattaaggtcggatttaatttatagctttaaatatggtgattataggacggatatttacattggaaggtgcataacgatatatttgattataagtttctgccggtatttgttctttgttttcaggagctgctgttgtacgttgaagttgtatgccgtataagttttttgcatcgcaggctgtacttgagataatattggctaatcctgagccatttgctccggtgctgaataaaccgctccaaatgtttgattgattttggtaggcagtgagataggcttgtgctaatttctcattttttgtaatagctgggaaatttatttctgcattattaaagtaagtaattgcttcatttcgacctatggtgatttcagtcatctccaataattggcaagcggagggaatataccattggcttagattattagcattaatgggattggaagtattccactgcgtccaatcattaaagccatctccgacattttcaatcagagatttggtataagtaaaaccattataatctttaaaccaagcattatttacgtttatagtatttgacagattaagttctccttctgttatattagtacgtgctgtactgatgtttgtcagtgccatagcatacccatagattttcatgccatctttaccatattcagaattatctgttttatcttttgcatcagcgaagataatgcctatacttttttgttctccttcagcattgtaagtatctccccaagttccatcagcatagaggtattgtcctactttcggtgcattcgggtcttccttttctccgtcaatggttacatctacattgatgtcttcttctttggaaaggttagcttcaccgttaatttcagtattcggtttaactgtaaatccggctttgatagttctttccacaggagtctgactttctgcaacattgaactttatttggatgtcgctattaaactttggttctggcattgtaggatcttcaatgaacaaatatgttgagaaataaagagcatcatccgcttctcttgtaactccggttgcttttacggtagtcttggttccggcagctttgcctgtcagcatgttgaattctcccggcatgttgaattcaatgtccattgtcgtaatctggtctttccatttgtcgtcagcagtaggcttcagattcagttgggcgaaggggcgtttcaatgctatgctcggcgcttccgaatctgcaatcatatctttggacaatacaccgcagaacgcatcggcagcggcattgttgaagagtttgacattgttggctgcgtcggtttcgtctaccttaacgctgatggcttgcagattggcggtgttgtagtatttatcggcatatttgccttctgcttcattggcatttaagtctatataatcagcccaaaacagacaactgtagtctatgccgctctctaccgaaaatgtgaatgaaattttggtatcatccgcacctaccggcttttctatacgggtaatttcagatttgtcctgattgttcacaacagaaaggatacagcgtaactgattgtcattaattacgttgtctacacctacgttacgtgttgctgctccggcaggtatttgtgccgtaacagtcacttcttttggggttccgttttgagtggagataatctcctcttcactgcaagctgcaaaacaaccgatgaatgcagccattacgatgtttaataatcttcttttcataatcttagaaaaattaaagtgttatataattattgttgtttcttattctacaatcaagtcttcatcgattgttccgtcaaaaccggggtcgataccgatgccgccggaagggtcggcggtcaggaagttagaatgcttcacaatacggtcgccttctttgcaggcaattgtaaggtaagtgcgtgccaatagtttttctttgctgtccagcaactctacggcaataggtatctcaccgttttccggtacgaatacatagtcgaatgcagcacttatttcttttgttcctgcggcaggtacggtaagtgtacggttgaacgtgatgtattgcagaccgtgcttgctgacaccgtccaatgtgtggaagccggtattgtaaaaacctaaatagcggacgcgcagattgtatttgtcaccggcttttgcaccgtctgtcataaatttttcaacgtcattggcgattaattcgtaacgggctgtaggacgtttcatttctggatttaaagtaatcgaggcattccactggttgcggtatttgcttaggttcaagtcctggcaagaatagagcacatctttatactcggtgtttccacgataggtctcgggagagattaccggtgccagtgtagtggtattgtaataaagatcctcatcgctgtcaatgcctacgtagtctgcccatattaccaactgatagtcgcgtgcgtggagtttcatgctgatttccgcgttcagttgtggtgcatcggttatatctttgtagataatctgtcgtttggagaggatacggttctggtaagcatccacgatgatacggtggcgatgtccggcatcggcacgggtgaggagtttgttttctgcaccattctctgcttccggcttcaattgcagtgataaatcgatgtttatgttcacttcggtggggtcgatgcccggttcgccgtcttctgtcagttcgggatgttcgtagagactgcatgccgttattaatgccggcagcaataaaagaagacaaatgcttttgacaaacggtaaatatatgttctttttcatgactttttcggatattagaagcggtaaaccaatgatgcgcctgcgcgggtaatcccccagtaattacgtttacgggtatccagtttggcaccgttttctatgttgtaataagtattgtatttcatgttggcatagcctgcaccaagtgtgaattcggctccccaatgtctggagaaaggcagcttatagccgtagctgataccggtgccaagtaaaggccatttctctgtctggtaacgtgtatcttcccatttcagattaaaccaggctgcatgaacatgcaaaccgaaaaaatgaccttttcccgccgattttaaccaccagcgtccttcaggctggaaagcgatggtgcgtaacccgtgctcgcgttcgatgtcaccgatactccacataaccggaaagtcaatggagatgtggctgtgtactttaacttccacagccaggttttgtacggctacggcaaggaaaggaagattggttttcaggacaatatagcttcctgaaccttcagaccgggttgagttctttgattttattttattttttgatgatgcctgttgcccagttctacttttggacatattgtcaagagaggtctgtgccgttttttttgaaactgcatttttgcctttcagttcggtttgcatctcttcccaagacttgtatacggtttctgccggtgaagcggaagtttgcatacggggctttcggggagtttgtgcccagatggacaaggaagccgtcaggcatactatgaagacaattcctcgttgcatatatgtatcaggtttcatatttttttgtttattagatttccagttcaggtaatttgtctcgtaatgtcgtttcataaccgtcttcgcgcactatggttacttcaccgtcgtaggttactgccgcatcgtattggggtcttggaaaacgtacgtcgaatgaaggcttgccttcggaagatacattggccttgattatccagcttcccattttgatactgccgtctttcagacgctgcggcacggcaaacggtttgtccggcgtagtcttgttgacatgtgtattgataatggtgacaaagcggtacactttatgtttgcctgaagtagcggtaaaatgccaatggttgggatacttcttgaagttacctttatcatctgcacgtagccagtttacagcaggcgtgaagaattggctggtggtatcggttttcagttcgtcgcttcccagaaggtaggcgtcggaaacaccgttcttgctggtggcctgtacgtgtacgaaatctttttccctacctacattcatcgggttggttaccgtgtgcagcaggtagctccaagtaacgggttcttccgcttcgagttcgtcgtaaataaaggtaaatccggtcttgcccaattctacgatatgacggcggaatgttttcagcttcacgtcatcccagccggcttccggactgaaagtaagctcttcttttcgggctcttgccagccagttttgggaaatgactttcccgtaggcgttggaagcatctcccaatatataacctatcttttcacctacgtagtaacgtggaatccaaccgtaaccttcggttccgatgcgttgtccgatgccattcacaagaattgtgttatgtgcacgcgtagcacggtggctgaacatactgtggctgtcgataaaactgatgtgatggccgctgctgtagaaaagcggctgtcccgaccagaaagtgttaaacgcattctgattggcaagtgcatgcgaggtgcttccgtaaggactgctccggaaactgatcatggagctgcgtcccaagcgttccagactggtggagaatgaagcaagcccggtttcggggaaaacatatccgaatggcatatccttgagtccgggaccttcgggcaacggcttgttgcattgcagacggaaccagcccagaccggcttctttgcttacgttgtcctcggttaatatatcggcacggcctgcctgaatggtgcggacatagctggcggcatacgtattgcccgtcatacgtgccaaagcatctgcataacccactctggagcctctggggcgtgtaacgttgagatgagcgcttccgtttccggctgatttggagaaaggcggctgctggtaaataacatacatggcatttccctgataccatgggtcgctgaaaaagtcgaaaccggaaatacggctgtagaagtagggaacctctatcagcgtacggacattgacgatgaaataggagtctccgttgtgccagcctccatctttattcagtccggggaaacgggctacccagaggttgtagcaataatccacccatgtgtcggcttctggcagttcgccatatacggtaaaagcagccattgtaaagatgcggaaagtcatttgccatacatggttgtcggcaatatggttctccaatcggttattgaaattagcgaacattttgctgccgtttacttttatggcatccagcagcattttgcgggtgtcggcatcaagcaaatcgtataaagtatcgtaagcggtggcacaaagagatacgaatgtggcggcgttgaaatcgcctacaatattcttgtcgccgctccaactcagcatttccttgatacgtttcatggcttcatcggaatagcgacggtctttagtcagcagataggcgcgtatcagtacatctacattgatttcttcattgtcgatgatgcggcggctttcgcgcgtcaacatagattggcgttgcgaaggattggtgagtttctccgccagtttgctgttgatatctttggtggttttcataggagtggcgagtgctttatccgcacgcgtgataaagcttttgcggtctgcgcttccggcactgcgcctgatgaggttgtcccaatcgtttttatccatatagacgcgcggatgtgctttgggtaatccggcaagtacggttttcagtgccggcggacaaaactttcgggcattttttccgattgtgacttgttgtgtgcttgcccaatatgttttaccatttacaatgtagccgaactgccaatgccatacaccgggagcaaggtctttttccggattgaaaaacggccagcgtgtttctacttgcgtatttccttttttaaaaccgggatcttgtgaccagcgcaacgcataacgtaatttgtttttgtcggttttggtacgtgcggcttgcgcaatcaaagctttcaatgttttgtcttgtgtatcaaggtcgacaagaagcggccattggaaagatatgctccggtcacttattacggctttgtcttgcggatatggagtggctcgcatttcgtgcatcaatgtggtatcggtcagccggatacgggcagggtcctgtgcttctaccgttatgtttgttagaaatagtattactgtaaataaggttgttctcataaatatattgttttgaatatttttctctgtcggcaaagctatagtatttattgcagtagcaatttttgccttgtctatcaattgtttgacattggtgattttccttttaatttcgttcgggtttcttacaattttgtttaataatcgcttgtataaacacctatagcgttaatatccagggttatttactccttcctgtttaccattaatctgtagttcatcttcaggaatcggaaacagttcgtgctttcctttcttgaagttttgataggcagggtaggcggtattggtagaagtgttgactgccgtattttctccgaatagagtcagtgcttcctttaatataccccagcggataagatcgaacttacgctgtccttcgaaagccagttcaaaaccacgctcccaataaagggcggtacggaatttgccggcatcgtcgttatcatcgatgaagtcgagctttttcataagttcatgggtcttgaacaaacttttatagttgcgggcagtaatttctgtggcaccggcacgcttgcgtacactgttcagaagttcccaggctttggctgtattgcctgtttcattataagcttcagccgccatcagtacgacatccgcatagcgcaacatgcaatagttgacgtctgtatagttggggtctttatagccggcaggcatccattcacgtctccattttgctggagtccagtttccttttttctttgataagtctgtcttttcgtgcatgccggtttctttattccatgtccagctatgccttccgatggcgacatcccggcgtgtatcctgtgcctcatagaactcataccattcgggtatggcgcggtaggaaaccgctgcacgtcccattactttgttcgcgtctgccgaatttgccggtgcgtctgcaaatataccgatataggttccccaataccctttagtgccgggatagtagaaagatacttcaaacaggctttcccggttgttcagaatgccggcagagaaacttttgaacaattcttcgtatccgccgttataaaaaccgtgatactgtcctttttcggattgaaaagcttcccactcgctgataaccgaattaaaatatcgggtgcgcagcgtttcgccagggcgggtcgttttgccgtccagttgcaggctgtatccggcgcgggtcagcaacacgcgcatcagcaaagcacgtgcgcttccttgggtggcacgttcgggggaagaactgtcattggcccatttcaggtgttctttagcgaaatcgagatctttgatgatttgttcgtatatttcttcgcgttctgtacgcggtttatacgaagcctcataatccgttgtatagtttgtactaaaaggtacatcaccccaatagcgcaccaaatcgaacgcagcttgtgcacgtaagaatttcgcttcggctacgaacgcttgcaatacttcgctttcactatatccgtccatattctcgatacccgcaatggtataattggcacggttgatttgctggtattttcctacccataccgcgtctacccatgtgttggcgggacgaatggtataatggcagatatcacggcgggtgttgtcgctattggttccgctggcatagtatgtatcatcggagcagggaaaagccatgccgtccttatctccataaatagtgggcagtacgctgtagattcccaataccgccatgtcagcctgtttatcggtaatgaagaagtctttacgttcgtaagatgaatcgggagattcgcttaaggtatcttcgcaggcagtgttgatgcacatgcttgccaataagaagcagatagtatataacgtattatttcttttcatggttgtatgttgtttagaaagtgatgttaagtccgaatacatacgagcggttacggggataagcgccatagtccacacccggtgtcaggttgttgcctttggtggatacttcgggatcaaagccgctatagggtgtccatacgaagaggttactgcctgtaaagtaaaggcggagactttgaacgttaaacttacgtagctttttacggtcgaaagtatatcccaggcttagattgctcagtcttaggaaagaggcgtcttctactgcccatgagtgtatgtatttgtcgcctgcttccatatcatatatacatgcaactgtttttccggcgttgattgctgccatttctgccgggtcggttatcggttgtccttcactgttgacagtcatccagcggttgctgctattggctatgtccaatacgctgtaattggtggtggctgttttggtgttggtcagtttggttgcattcagcacctcaccgccatagctgaaagtgaagaagaggctaaaatcccattctttgtatttgaattggttgttcagaccaccgtagaagtcgggattggcattgccgatgacagtcatgtccgagtcgtcgatgattttgtctccattccggtcttcaaatttccacataccggggcggacgtcgttgcggttaaacgtgccgctcatgtaaggaacaccttctttcagggtatatgtctggtttttggcatcataatcaaagtcctctatctgatataatcctgacgttttgtaaccatagaattgtccgatgggcttgcccacctcgattttatgtgttttctggtcataaccgaaacgggcttcttcaaggaaataccgttctccggatagagcttcaatcttgttgcggttgtgagatatgttgaagtttgtggtccatgtaaagtttttcttctgtatattgacggaagtaacgctgagatcaaaaccgatgttgctggtctttccgatattccgcatcatggttttgtgtccggaagaggtcggtacacgtgaattcagtagcaggttggagcttttgttgaggtaaaactccggagaaacaattatccgttgttccaaaaatcccatatctatgccgatattcaatgttttgttcgattcccatttaaggtcggcgctgggaattccggatgtggcgtatcccggtgacagtgattcaccgataggatagcgggtggaggttagtaaatcaagcgatgtatagcttgctacgcggttattgccggccaaaccgtaacctattctgagtttcagatcggagaaaagattcagttttttgacgaattcttcttcgctcatgcgccatgcaacggaaacagacgggaaaaagccccacttgttatggtcggcaaatttggaagaaccgtcagtacgcactgtggctgtcagcaggtacttttcccggaagttataattggcacgtgcaaagaaagagagcaaacggtcgtcgtcgttgacgctggagcgtatttcgctcggagttcccaagttcatgtcgttcagtccgatgtcattattcgggaaattggtagcatacgctcctaagtatttggcccagcgtgaaatccactcttgacccgccattacattcagtttatgaatcttgcctctataatcgtaagtgaatacattggaggtctggaaactgccgttttcgttgtaggcaatgtttccgttgatactggagcgtttgccggtaacggacttttctccgtagaatatatcctgacgtgaaatttgataacgcataccggtactgttacggaagctgaaccgtttggtgaaattgaaagtaaaaccaccgtttgcctgcatactgcgtatctttcggattttagtctcttcttgtgcggagaggatgggactttgcatgggattggattcatcgtcaatcaggtcatcgtctcccgttatcaagtcgcggtcattaccgctcaatgagttgacaggacggtattgtaatatatgctccattttattgaagcggttattaccttctgaagttcccatgccgtatgttttcgattcatcgtaattgaggcgtgcgtttgcctgaaagcggctggaagctttgtgtgagatgttaaaggatatgttatggcgatccataccgctttttatcatggcgcccaaatcttttacgtagttataggaaaggctgtatttcagttctttattcccgccggaaatatttatgcggtaattctgggaggttgttactcgtccgaatgcttcttcctgccagtctacaccttcccggtttccataattctcgtctatctcccggaaagagccgtaagcattctggaaacgccgtacgccactttcgccatataaggcgagattgcgttcgtaatcgagcaatacatactccttggatgacaatacatcgagttttttgcttaccttccgtatacctatataactgttaaaactgacattcattttagaagcgtccttagcgcctttctttgtggtaatcactactacgccgttggctccgcgtgctccgtaaatagcagtggaagaagcgtctttcaggatgtctatggtttcgatttcaccgggatccaggctgttcatgccgtcttcgctggggaatccgtcaataacgtaaagcggttcgttactttgggtaatggagatgccgccacgtacacggatcgatacagatgctcccggttcgccttcgctttgcatgacttgtacacctgccacgcgtcctgccagtgcttgtgctacgtcagaagtaggggtttgcatcaggtcttcatttttcacagacactacggaaccggtcagatcgcttcgtttgcttgttccgtaaccgatgacaacaacttcgtccagaatcttactgtcttcttgcaaagtcacattgatttgtttttgtccttttaccgctacttcctgtgttctcattcctatataggaaattaccagtacatctttggcagggttattgactttgagggtgtattgcccgtcgatattggtgattgttccaactcccgtacttccttttatggaaatgttggcgccgataacttccagcccggtattgtctatgacttttccggtaacggtgaaatcttgagcgtgaatacccggtatgcagagtaagcaggccattacaaggacgattcttcggatgtttttcatatggaatctatgatagtaataacaatttgtttttgcgtttgctaaattaggttctttcccatttaatcgctttttagtgtgtgttgtaattctacagtatcgttgatttggcttttagttctgtccagttttcttatatttttgtagaaaaagtatgggacaggtatataaaaacagcctgggtttacgtattcaacgtaatcccaggctgtttttacgggtatttgcgggggcttgtttaccgattgttttttattccgccaaagtcgcccttctacttcagtccgaaataattttctccttctccgccgacaggacttatgacgggaatattcccccctgcggcagtcaggattacgctttctcccttctttaaatccaataggtactcaccctctttttgcagggtcaatgtggcattgcctgcctttacaaccggatttgccatatcggtgcgtaggatacacggttctccggcaaggcttttgatacggatgaagcttgtctttccgcctttccgcacagcggatacgaggaaagcgccttcggttctcaggtccttgaactgtacatctttccattgggaaggtacggcagggaacacacgtatctttccgccccagctttgcagcaacatatcgtgtatgcactgtgcgcccgacaacggggtctcgataaccggtccgctttccatatacatggtgttggggcgcagggtgcgggcaaacaggccgttgagtttctccagcgccttgtctccctcgccgaatgccgcatacagcgaagaagcccccgtataagtatatccaaggatattgcccggcaggctgtgccagtgctctacggatttttccataagttccttgctgccgttctgctcggcattcaacaggtagagcggatagaacatcagcaggtgcgagtagtggcggtgcgagcggctgaaaggtacatccttgcctatcatcatgccgttttcgtcttgcgggtagtcggtcaggtattctgcaacttgtttccagcggggtatcagctcgtcatcgacagatagaatcctgcttgcctcgagcaatgtattgcatccccagcgcaacagggcgatgtcgtagttgcagtcttcggcagtaccgtactccggagaataggttcttttcaaatgaagcttgcccgatttgtcttctgtcaggaaaggcagatagaaattgacggcccgtctcagtgtagggtacagggtattcctcaatatcgattcgtccatgctgaagcggtattgtagccagaggttatggcaaatccacgtcaggttgcctacctgggctttcttttcggttccgggaacattcaccgttgctcccgtcagggtaaagtcggtggctacgggcagtgcggcggcatctttccggtagggttcgggaacgttgtttatcaggttatccagattgtttcctatcgcatccaccagcggcatgcccagttccagccggttggatgggtatacggaccagtagctcagttgcacattcaggttccaccaggcattgggccagggagtcagcacttgccagggaccgctgttgtcgagcagtccgccgccggtgcgggtggccgatgccagcttgtacatctgcgcccagtagaaattctccatcttcttgtcgggaaggctcacgaaactttgcggatagtagttatgccaccattcccggtgtactttccggagcacgggcaggtcggcttcctgcaggcttgccagtgccgtttccgccttttgcaaagcctctgttccgggaaaggaatgtgcgttgcttacgataagcgtgcttgtattctctttccttatctctttccaggctgtggcagtaccgccgccggcaagcaggggctgccagcagaggttcagcccattgcgtgcggacagttgcggggcgggattggacacatagtcttttttgaggtggttcttgttacccttccggattgcattcaactgcctcggcgaatccgtgttttccggatagaatttccaggtgaactctttttcgcctgccgtagcttcggcttcgaccaggatatagggactctcggaagtgacatgggctctcagctttatctctccccgggtggtacggatacacccggtggtttcagcattccataagtccagcctcaggtcgccggattttatttctcccacgggatgcaggagaaaataaccgataagcagccggcctcttccatagatgctcgcatcgtctgtgcggtggtcgtgtaccatgcagttgcctacatctacccgtatggcgttttttccaggttccttgcagatataggaacccatgctgccgtttcccatgaagggggcttcgtaccaggtttggggcaggcgggtccaggtcatgtcctgccgtgacatgaaacttttccagtctgtctggctgtaacagccggctgtcaggtaccagattgcgattgtgagcagtagcagtttcttcatgtgtccgtatatgttttcttgttgatatgttttcttgctgttagatttccagttccggaacctcatccttcaactcggtctttttgccgttatcatgtatcacggttgcaccgtaatccttgtaactgacgcttgcgtcgcagtctttgcgcgtgttgcatacttcgaaagaaggtttcccggcagtggatatgtttgctttgatattccagtcaccgatttggatactaccgtctttcagtttgcggggagcggcttgtgcgttttccgcatcattgtctttggcatgtgtgtacacaattgtagcgaagcggtacactttctgtttgtccgatgttgcggtgaagtgccagtggttgggatagggtgcgaagtgtcccttctcatcggcacgcagccagttgacggcaggtacgaagaaccgggaggtcgtatccgtctccagcgttccggaggagaagagataggcatcggacgcaccgtccttgctggtggcccgtatgtgtacgtattcccgggtcttgtccacattcatggggttggtaaccgtatgtagcaggtagctccaggtcacgggttcttcggcttccagctcgtcgtatataaaggaataaccgcttttgcctaaagttacgatgttgcggcggaagattttcaggccggtatcgtcccaaccgttttcaggagaaaattccaggttgctttgttcgccgcgcagcagccagagcggagagataacctttccgtaagcattggaagcatcgcctgccacatagctgatattgtcgctgacatagtaacggggaatccagccgtaaccttccgttccgatgcgttgtcccatgccgttcaccagaatggtgttgtgggcgcgggtggcgcggtggcagtaaacgccgtgtatgtcggtaaagctggtatggtgtccgctactgtaaaagagcgactggccgttccagaaagtattgaaagcattctggttggctatggcgtgcgaggtactgccgtaaggactgctgcggaagctgagcatggcgcttttgcgggtatcgtccaggttggtggagaacgaggccagtccgctctgcgggaatacatgtcccatgggaaggtctttcaaacccggcccgtctggcaagggcttgtcgcattgcaggcggaaccatgcaaggccgccggctttcgaggtgcttccctgttcgagtatgtcgggctggcgggcgctgatgtggcgcacgtaatctgcggcaaatgtattgccggtcatacgcgccagagcatcggcgtagccaacacgcgtaccgctcggggtaagtatcttctggtgcgagctgccgttgccgcccgattttgagaatggcggctgctggtagatgacgtacagggcatttccctgataccaggggtcggagaaatagttgaagccggtgaggcgggtatagaaatagggcacttctacaagtgtacggatgttgacgtggaagtaggagtcgccgttgtgccaggctccgtccttgttcagaccggggaagcgggcgagccacaggttatagcaatagtccgtccacgcatcggcttcgggcagttcaccgtaaacggtaaaggctgccatggtgaggatgcggaaagtcatctgccacacatggttgtcggcgatgtggttttccaggcggttgatatcgtgcatgtacatgctgttgccgaatgcttttatttcgttcagcaggaatctgcgcgtggcatcgtccagaacatcgtacagtgcgtcgtatgccatggagcagagcgagagcagggtggcttcgttgaagtcgcccaccacgtttttgttgtctccccaggtcgccatctccttgacgcgcttcacggcttcgtcggcatagcggcggtctttggtgagcaggtaggcgcggataagtacgtcggtattcgcttcttcgctgtcgatgatgcggcggctttcgcgggtgagcatggcatttttctgcatctcgttggccagtccttttgccaggtccgagttaatgtcgtttaccgacttcatcggagtagcaagtactttgtcggcacgtttgaggtaagtcttgcgttcggttttgccctcgctgcgctttatgaaaccgtcccattcgtccctgtcgagccatacgcggggatggtgggcaggcaggttcttaagtacggcatccagtgcgggcgggcagaatttccggggattgttctttaccgtaaattgcagcgtatcgctccattcggtctttccgtccgtaacatagccgtattgccagtaccatgtgcccggagccaaatcctgtttggggttgaagaacggccagcgtgtctcggcttgtacggtcgtttccggcttgaatgccggagtttgcgagtagcgcaggaagtagcgtagcttgcttttgtctgtttctttttttggggtgttctcttccgcaccgtccagtccgcttcgcaggatgttgaggcctgccggcagcggccattggaaagacacggcacggtcgctgatttcagcgccgtccagcggcgagggagttgcacgcatttcgtgcatcagcgttgtgccggtgagcctgatggtggcttctccggccgtttgcgcctgtgcagtggctgcaagactgaagaaaatgatggtggatactattttattcatatacagcgttatataagtttattgattcttggtctgatggcggtttaatgtttggttgcttttgtgagcacctttcccggtacatcgtgcaatttgggacgcgtcggtctgattttatggctattcatgaatttctcaagaatatcacgatgttcctgcgccactttcgtataggcgttctccatcatcaggtttcttgtctcgccccggtcgttctgcatgtcgaacagttgttcgcggtgtcttcctttgtcgtacaatacatatttgtagcgtgcggtgcgtaccatccagccccgtgtcttgctgccgtcgaattgtgtttcggtaatgacatactcctggtggggagcttgcggattgccttcttcggctattttgcggaacgactttccgtcagcgtcttccggcagtttggcgcctgcccagtcgcaaacggtagcgaagaagtccacaccgttactgatgagctgcggcagctttgtgccggcatgtttcttgccgggcagggttacgatgaacgggatgtttaccacttcctcgtacagggccgatttctggttccagtggtgggcgcctattccgtctccgtggtcgctggagaagataacgacggtattctcccacaagttattcttgtcgatggcgtctacaatcttgccgatttcacggtctactttctctacgaggcggtagtatgtgtagcggtacatacgccagtcttcgggggtgaaagtggcggtggggtagacgttgaaattgttttccctttctttctcgatgacatcggcatcgtacggattcttggcaaagttagggggaagtcccggacaattgcgtatttcgggtatgtccaggttgccgtagggaagattctggctgcgtgcatattcgcagatattatgcggattgtcataagaagctaccaggaagaaaggcttgttgtgtttgcgcgaaaggaattccacacatgcttctgccagtccgtcatcgctgtgtttgtaaatttggtcgaatcctcgcactttatccggaatatcgagttcgggcacatgccatttgccgccgtaggcgcattcgtatccagcattttttaccagtgtgcccagggttcgcgtctggagtgattcttgtagcggagcaccgttgaccaacagtcctgttgtgcctgggtagcatcccgtgaacatggcgccgcgtgaagggccgctgagcggtgcggtacagtaagcattctggaacatgataccggcggcagccagtctgtccagattgggcgtgtgcaagtccgggtttccggcgcagctcatggcgtttgccgtatgctggtcggtaaagatgtagatgatgttgggacgttcggcagcgtgtgccattgatgtactgagcagggataggcaggctatgtgcttcactgagatttgttttaccatattattagttttataattgttttttcggagactgttcctcgattgctaaattacgcctttttccatgtatctgcggactctaatgttttttttatggtacggaatgtttatttgattgctaattttgtatagttctgttttaattttgtgctaaaagagggatacggaggcactgaaacgcagggagggatgtgaacgcggagatgcggaaaaacagagcaggagaggggacagggagaggaacagccttacatgaaaagagccgtttttaagactctgtgtctctgcatctctgtgtctgaaacaagaacaacttccttccccggctcgcttaatcgaatttttgcattatctttgcattgcctaaaaaaagaaaagcgaatgatagtttgtattgccgaaaagccttccgtggcgcgtgacatagccgatgtactcggagcgaaagataagaaagacgggtacatcgagggaaacggataccaggtgacctggacgttcgggcatctctgtacccttaaggaaccgcacgaatacacacccaactggaagtcgtggagcttgggcagcctgcctatggttccgccccgcttcggcatcaagcttatcagcaaccctacctacgaacgccagttccacgtaatcgagaacctcatgcagcatgccgacatgattataaactgcggtgatgccggacaggagggagagttgattcagcgttgggtgatgcagaaagccggtgcgcgttgtccggtgaagcgtctgtggatttcctcgctgacggaagaagccatccgcgaagggtttgccaaactgagggatgcgtccgatttccagccgttgtacgaggcggggctttcgcgtgccatcggcgactggctgttgggcatgaacgccacccgcctgtacaccatgaagtacgggcagaaccggcaggtactttccatcggacgtgtgcagacgcctacgctcgcgctcatcgtaaaccgacagctcgaaatacagaacttcgttcccaagcaatactgggaactgaagacggtgtatcgcgacaccaccttctccgccattctccgcaagagcgatgaggaactggtgctggaagcggaaaaacagaaagaaggggcaaccgccaaagctgccaaacccgaagataaccggggaatagaacctatcacagaccgggaacggggtgaggctttgctggaacagataaagaattctctttttaccataacgaacgttacccgcaagaacgggaaagaggctccgccccgtctgttcgacctgacgtccctgcaggtggagtgcaaccggaaattcgctttctctgccgatgagacgctgaaaaccatccagtcgctttacgaaaagaaagtaacgacctatccgcgtgtagataccacttttctgagtgacgacatctatcccaaatgtcccggcatactgaagggactgcgcgattatcaggtattgactgctccgttggacggggctactctgccgaagtcgaagaaggtgttcgacaactcgaaagtgacggaccaccatgccatcattcctaccggccagccgccccagaacctgacggatatggagcgccgcgtattcgacctgattgcacgccgtttcattgccgtgttctatccggactgtctgttcgctacaaccaccgtaataggcgaggtggagcagatagagtttaaggtttcgggcaagcagatactggaacccggctggcgtgtggtattcggcacgccctcggcacagtcgcaggaggaaaaagaggagaagggcggcgaagaagagaatgtgctccccgcctttgtggtgggagagagcggcccgcacctgcccgacctgtacgagaagtggacgcaaccgccgcgtccgtacaccgaagccaccttgctgcgcgccatggaaactgccggcaagctggtggacaacgacgaactgcgcgatgccttgaaagagaacggtatcggccgtccttccacgcgtgccgccattatcgagacgctcttcaagcgcaactatatccgtaaggagaaaaagaacctgatagctacccctacgggtgtggaactgattcagattatccacgaagagttgttgaaatctgccgaactgacgggtatatgggaaaagaagttgcgtgaaatagagaagcgtacctataatgccggacagtttttggaggagttgaagcagatggtatcggagattgtgatgagtgtactttccgataacagcaaccgtcatatcacaatacaggctcccgtgccggaaaagggtaagggagaaaaagccgctgccgcatccgataaaccgaagaaagaaccgaagaaaagagcgccgcggaagtctgcaacgaagaaaacggagcaggcagccggtgagaaccagcctgccgatgcgctggtaggccaaccttgcccactttgcggaaaaggaacggttattaaaggaaaaacggcttacggttgttccgaatggaaaagcggttgtacattccgcaagccgttcgagtaaagttatatccggttataattctttccgtattttccggttgctgctctgaaatcttttcaggtgtcagtagttcagatggaattcaacaaccgcctcgattcctttgcgcagtatatccaacggaatgttctcgttgggagaatggatggcgttggactctagaccgaatcccatcagtatggttttgatgcccaatacctgctcgaatgtggagataatgggaatactgccaccgcgacgtactgccaacggctttttgccgaaagctttggcgaagcctttctccgcagcctggtatgccgggagcgtgatggggcatacgtatccctgtccgccgtgcatgggggtgacttttacctgtacggtatcgggggcgatagccatgatgtaatcggcaaacagttgcgaaatcttgtgatgatcctgatgcggaaccagtcggcaggatactttggcgtatgccttggagggcagtacggttttggaaccttcgcccgtatagccgccccagatgccgcatacatcgaaagacggacggcaactgttgcgctccagcgtgctgtatcctttttcgccgaaaagggcgtttacgccgatagcctttttgtatttctcctcgtcgaacgggatgtgcgctatcatttcacgttccgcctgcggcacttcttccacatcattgtagaagccgggaacggtgatgcgtccgtcggcatccgtcaccttgcttatcattccgcaaagcacattgatggggttggccaccgcaccgccgaaatgtccggagtgcaggtcgcggttcggaccggttacttctatctcccaataggcaagtccgcgcaggccggtagttagcgagggaaggtctgcacccagcatgctggtgtcggacacgaggattacgtcggctttcagcagttctttgtgttcccggcagaagccttcgaggctgggcgagccaatctcttcctctccttcaaagatgaacttgacgttatgagtcagcaggttgttctttaccagatattcaaaagcctttacctggatgaaggactgtcctttgtcatcgtccgcaccgcgcgcccagatgtggccgtcgcgtacttcgggctcgaagggattgcttttccagagttccagcggttcggcgggcattacgtcgtagtgtgcgtatatcaatacggttttggctttcgggtctacaatcttctgtccgaatacgatgggattgccagccgaaggcattaccagtgcttcgtctgcaccggcggcgagcagcagttgcgcccagcgttcggcacacgccagcatgtcgtcgtggtgttcgggtttggcactgatgctggggatacggataaggctgaacagctcttccagcattccggattcgttctctgcgatatatttctttatttccataataataatgtgaaatgatgaggtgatatcctatcactttatcacccgtttgttataattgtgtagtacggtcaatcaagtagaaatcgagcagggtcatggctgccatggcttccacgatgggcacggcgcggggcagtacgcaggggtcgtgacgtccgcgggctttgagggtggtgtccacgccgtccatgtttacggtgtgctgctccatgagtacggttgccacgggcttgaaggctacgcggaagtagatgtcctgtccgttgctgatgccgccctgaatgccgccggagtggttggtatgcgtttcgatgcgtccgttgttgttatagaacacgtcgttctgttcggagcctttcatcttcagtcctttgaagccttcgccgtattcaaacgcttttgcggcgttgatactgagcatgccggcggcaagggcggattggagtttgccgtaaacgggttgtcccagtccgatggggcatcctttgataacgcaggtcaccacgccgccgatggtatcgccttcgccctttatcttgaagataagctcttccatttctttggctttctccgggtcggggcaacgcaccgggttggtatcaatcaggtcgaggtcgtaggcggtatagttttcttccagtttgatgggacctacctgcgaggtgtatgcggtgatgcggatgccaagctgttttaaggcgagttttgccaatgcgcctgccactacgcgcgaaatggtttcgcgtgccgatgagcgtccgccgccacggtggtcgcgtattccgtattttacattatatgtatagtcggcgtgcgaggggcggtatacttctttcaggttgttatagtcgttggagtgttggttctcgttccacacgatgaatccgatggggcatccggtggacttgccctcgaagatgccggaaaggaattccaccttgtcggattctttgcgtgaggtagtgatgcgtgattgccccggtcgccggcggtcgagctccgattgtacgaagtccatatcgatggtgattcctgcggggaatccgtctattacgccacctatgcctttaccgtgtgattctccgaaactggtaaggcggagaatattgccgaatgagttgaacatatcaattgctttaagggtttataatgaggttaatgtgccagtttgccttgttataaaaggctttgactttataaaggtaacaattttttttgtaaaacgtttcaaaaatgacaataaatcttttatttcccgacttttagagaataaaaatactgtttgaaaccgtatctttttgcggaaatatgtaagagtatttaataatgtaaagaatgcttataattcttcctatatgaaaaaaaggacatctattttttattaaagaccttgtttaaaggctttaaaaactgttattttgcaccctcgatataaaagagaatattaactaacccttaactatgtagggattttattaactaaacaagtatttgtatgaagaaaaatttgttttatttattcgcattgatttgttcaatgagtttatttaccgcttgtagcgatgacgatgaggcgccgggcaattctggagtagttggagaggttgtcggtgactacaagggcttgatggatgtttactatgaaccaaatgtggaaatagccaaaggcatgcagcaaaagataactatcaagaagtcttccgacacttcaatcggtttggaattgaagaactttgtaataacggttggcggtgctccgattactattggggatttagctattgataattgtcctttgaaagttgagggggataaatattcatttaccggtaacgcagatttagatttggttgtcggtaaatgtgcggtctctgtggaaggagctatcaatggtgaagatattgaattgataattaaagtgaatgtgaataatgacctaatgaaagttcgtgtagaatataaaggtaaaaaaatgacagggaacgaaagttcggaagctttgattaaggagttcaaattcgatagcgatattattgcggagcaacctgtaatcaatgaagataaaactatcacttttaaagtggctgaaaccgcaacagatgatgatttgaaagcattgaagccgataattacaatttctgaaaatgcaacggttactccggaatcgggtgtgacgcaagacttctccggaaataaggtagtgatttataaggttacttctgaggatggtacaacagtgacggagtataaggtttctgctcgaaagagttcggatgctttgattacaagttttgttttcgagaataatcctattgttgcagaacaaccagtaatcaatgaagacaatacgattacttttaaggtgaaagcctctgctactgctgatgatttaaaggctttagtgcctacaattacttattctcataaagcaacgatagctcctgagtctggtgtggcacaggatttttctgataataaaaaggtgatttatacggttacttctgaagatggtacggttataaaggagtatcaagtttttatttcaggtactgaagatgtgtatgattttgaaaagtggcttcctggagtagaaggacaagaacctgaaaatactttctatgaagcggagggatgggcaagtagtaataccggagcacatttcttgaaagggttcaatcttactgatagttatgtcataatgcaaacagatgattctcattcgggaactgctgcagcaaaaattcagtctattgatacaaaaggacaagatctgggtatagcaaaagctcctaaagtgactacaggttctttatttctaggaaaatttaagactgatatatttaataccttaaatagcactaaatttggtatcccctgcaaagaaaaacctatttctttgcgaggatggtataaatatactcctggtgatgtatattatattgtaaataccaaaccatataaagaacattgccatgaagctgtagtagacgaaactaaagttgatgaatttatgattagcgtagttttatatgaaacaactgcttatgatgaaataggctggtctgattgtctaaccggtacagatgaagaggaaaagaatatttatacttcaagccgtattgctgctattggacaattgattggtggtgctcaaactgattggaaaaagtttgagttacctttggaatggaaaaagcagtatgataccaataaaaaatatcgtatgactattgcttgttcttcaagtaaggatggtgataagttttggggtgctccgggtagtacattgattgttgatgattttgaattgataaaagagtaattagatcctttcggttaaagtaattgatattaaatataaaggatacttctgtgaagaagtatcctttatatttaatatgtgtcgtcctaagcgaagttgattgattattattaaaatcctatatagggttgtctatctaatttccataagctattggattgtttgggagttgtaaagggctacttgagagttgtaaaggtcaactttagcatcataaagttctacttgagaggatacagtatgttatgtataatataagtaccaaacattggtactccaaataccacgtagcggtatctcatgtaccaagcattggtattttaactaccaagtgttgatactaacggaataccctcgtataaaatgaaaaagtgacgaccaaaaatcggtcgtcactgtatataagcttgtcgtcaccagataacaccttcgtccttaatgcattaagacgaaaagtgacgagtgacgacaaaaaacgaaaaaatcttgtttagaatgcatacccaaatcctaagttcagatagataggatacatattaaacgttatcgtatcgaagtctttctggaagatattgtttaatccccacgttacatcggcatgcacggtgagatgcttgaacgctttccattcgcccccaaattggataccccactggaacttacgcaactcgttggagaaatcgtaagttgcgatgctttcaccggtaaactccactttggaaccggtctggtcgggtgtgcgcaagtgaccctcgtacacgtgtccggagaagttgccttccagcagataggagaagtacggacctgccgatactatccagcgcttgctgatgcggtagtcggcaaggatgggaatggtgagataggagtttttcactttggttttgactccacccgtccaaagacctgccagctctccgccgttggtattgatgattttcataccgtagttctttacggtggcttcggtagtcatgttcttgttctccaaccgcagtcccagggtaagtccccactttttcttttcgtcgaaccacttggtggcattaccttcgatggcaatggcgattcccggtgcgtagctgtctatcttgcgtatctccttgggcaggggaatgggagatgtaccgccgatattgaatccggctttaatgttgtattcccaaccgtgcagataggagttgataagacttttgtttctctcttcttgtgcctgtacgttggctaccattgccagcagtacggctatcgtgcaaataaaatgatgctttttcatattctataatcagatttcttcgcttataagttctaattcgtctacgtataatgtgctgccgactgcccctttgaagtacgcaccttccacgctggaggagaggacgatgcttaatttgtactttccgttttgcagtttcgacttgtttatctctttaccgttcataggttcgaaaggtaactcgaatgctgtccattcgtcggtttctacagcagccgcttcactgatttgggctttggctacaatgttttcggaagtcaggctgttgctgccgtccagcataaaggagttctcgtttgcttcgtacagtatggcgtaaatgtcgaaacggtctttcatgtctttctgtacttcgccttcatcggtataaacttctcctgccttgaatttgaagtaacccttcaacgctatggggcgtttgtaatactgtatgccgaacttggtggcacgcagaggatctttcagtgcgtttgccaggtcgaaggaaccgataaacaggtttccggcggcaatatacatttgcaccatggctccgaaacttccggtgtcgcaagtggtcagtttcagtccgttgccgcggtagccgtcggcaacctgctgcgtaggatagccggtgcggttgtctgtcatgcctgtaagtttgtagccggggttgccgctggaccattgcgctacgcgtgaaacactggttgaagttccgggttcgaattcgtagaaaatgtcgtattcggtaccggcagaggggagcaggtcttcgaaatggaatgtttccggcatttcggcaggtactacttttacggtataggtagcggtccattcgccgtcttcggaagtgacggtgaaggtgcgggagtgagactcgttgctgaaatcgtaattgttaaggatgtcattcggtgaatgttcgtctgccttgatggtagcaccgtcgggcagcgtaaacagcagttgctgtttggcaaggtttgcccctttatgtacatatatgtttatttctttagagtcactgttgatgtgagccaattgtacatccgcgcctgtacaggcgtcaatggctgcttcggagttgagcgcttcgtcttgtatgcaggacgaaacggctaaggcaagcatgagagcagtagtccacttcttaaaattcatatccttcttttttgaatgttgataaataaatacagtttagcagtttgcaaaaatacgctattattttgtaataacagatacaagaagaaaaaagtgcggtaaactctggtatttatttgttattccgtatatctttgtataaagattgaataaaaatatatatggtatgactgaagccgaaagaaaacaaataattgctttggtacagcgcgaagtagttcctgccattggctgtacggaacccattgctgttgccttatgtgtggcgaaagcaaccgaaaccttgggtgcaaagccggagaaaatagatgtcttgttgagtgccaatatcctgaagaacgcaatgggagtgggcattcccggcacaggtatgattggactgcccatagctatagccctgggagcgctgataggcaagtcggagtatcagttggaagtgctgaaagacagcaatcctgccgccgtagaagagggaaaacgctttatcggcgaaaaacgcattgatatatcgctgaaaaagaatatcacggaaaagctttatatcgaggtgtgctgcaaatcaggcgggaataaagccactgccattatagccggcggccataccacctttatatatatagcccgtaacggcgatgtccttttaaacaagcaaagtgcgggttgcggagaagaggaggcgcaagtcgcaggcctgaccttgcggaaggtatatgactttgccatgaatgccccgctggacgaaatccgttttatccttgaaaccgcccgtttgaataaagccgccgccgaacgttctttcgacgggaactacggtcatggactgggcagaatgttacgtggcaattatgaacacaagattttgggcgacagcgtattctcccatatcctttcttatacgtccggtgcatgcgatgcccgtatggcaggtgctatgataccggtaatgagtaattcgggcagtggaaaccagggtatttccgctacattgcccgtgctggtctatgccgaggagaatggcaaatcggaagaagagttgatccgtgccctcatgctcagccatctgaccgtgatttatatcaagcaaagtctgggacgtctgtctgccctgtgcggttgcgtagtagccgccaccggctccagttgcggcattacctggctcatgggcggtacttacgaacaagtatcctttgccgttcagaacatgattgccaaccttaccggaatgatttgcgacggcgccaaacccagttgcgccttgaaagtaactaccggcgtctctaccgccgtcctctccgccatcatggcaatggaaaaccgttgcgttacttccgttgaaggaattattgatgaagatgtagaccaaagtatccgaaacctcacgaagataggttccaaaggaatgaatgaaaccgacaaagtagtcctggaaattatgacaagtaagtgattagaggttagcgattagtgattaagggggaatgattagtgattaatggttagcgattaatcgcagcattatgaatatgtgccattgataaaccaaatcaccacctcttaatcactaaccactaatcgctaacccttaatcattaaccgttaactacagcattcgctgctacagtctccgcagttgcatccgccaccgcatccgccgctgcatccgccgccgctcatcatgcgtgccatttccgacagttcgtcgttggtggcaggacggttttcggtgatttcacctacgaagttcaggtcgcagcctgccagggggtgattcatgtccattactactacatcgtcctttacttcgactacgcttccgttgatacgttggccttccgaggtcatcaaggggattacggcgccttctactacgcgttcgctgtcgaacttgccttctatctcgaagatgtttttggggaggtcgatgacatgctcctcgtcatactcgccgtaagcctcttcggctttgattgtaaagtcgaatttatcgcctttgttcaggtctttcacctggttctcgaaagattccaatgtgaggcccagtcccgatatgaattggaacgggtgctctgcgggagcttcttctgtgaactctttttctccgttttcgattgtgtacaacttatatgctaaggtgatgtacttgttttctactgtttccattaatttgttatttcttattagtaaatactgcattgtctgttttgacaatgcgcaaatttagatataaatcacgatttatatgccagtgggatatgaaaaaatcaagaccacccctatctttatggcgtggaggtctcagtgtgtgagcctcaaaataaatgtttcacgagctcttagtctcaaaatgtaatagcctatgcggatagtatgtggtcttgacgtacacaaagatagtgtatttgtttgtattctcaacgaaaaaggtgagaaatttgaagccaagtacggtgttttgacacctgaactggaagagctgcatcaacttctccttactcatgaagttaaggaagttactatggaaagcaccagtatttactggtatcccatctggcgcattctcagtgacatagaatgtctgaagttggtcaacccctacttcatcaagcagcttcccggcagaaaaagtgatgtccgtgacgctgcctggatagccgaatgtaccatgaaggatctcatccgtggcagtttcgtgccggatgagatagtgcagcgcatgcgtcagtataaccgacgcatttttgacttgaacaaggagaaggtctataaactgaccaaactggatgccttgcttcaacgttgcaatatccgtatcagcaactacgtatcttctacagacagtaagagctacaaagatgtggtgaaattgctttccgaaggaattgtcaatgcggaaaagctgacggaggccatccatggacggacggtgaaccgtgtcggaaaagaagtaattacagccgctctgacaggagttgtcaatgaagtggacatagacctgatacgccagtaccgggaggaaatccttatggatgacaagcatctgaaagagtgccaggaaaaactgacggaaatctgcaggaaagagttccccagggagttcgataatcttcagacgatacccggtgtaaaggaacgctcggcaacctccatactctctgaattaggggccgacatgaagatgtttattacagcggctgcattggtgtcgtggtgcgggctcaaaccacggaatgaagaaagcgcaggaaaaatcaaatcacgaagaatcacacatggtaacaagtacatcagaaagactatgattgaatgcgcatggggagccagccggacacaaaactgtttttactcgaatttcagttacacacaaactgtcgtcagaaggaagaatgccatgaaagtgaaagtggccatagcgcggaaaatgcttgttgtcatttggcacgtgttgagtgatggtgttccatacaatgattataagaagcctgaagctattgcagaaggcaactcataatataccgcttattgtaaggccagtatctttgtggtagcatagactccgttttgcaaattgactgatgctttaagcggcttagaatgccagtgttaggaaataaagcctgaagaggaaaatgatactttttatattgtatatctgactgctcttgatagaacggtcaatacattcatgctcattaacaccataaactaagtaaaggagccataaagacaggggtaatctttatcttttcatagagaaagatacgaatattttgcttcgggagaggaagcgtcccggtaattttcagattattaagtgctttgtaagtgtttggcattacttctgtaaagtatccgaatcgttttatggataaccgtcaagtgataaaataagattttaaagcatggtttccttacgattattcatgtttatatcttttttttcttcaatttgtttggagattataaaaaagcatttacctttgcagcataaataacggataagagaataataaagataatttagttatgaacctgcatacatccataaacctggcagtcctgcatattattcgcgtcgtggtggtggcatcaagagcgtgagaaaggttgtgtatgtatttgtacggtaaagatatttatagtaagcctttctcattacggtgagaaaggcttttttcataaaaggagacagataagatgaaacatcagttacgcagttcgttcagcacacaaggccgccgtatggcaggtgcccgcgcgttatggacggccaacggcatgaagaaagaacagatgggaaagcccataatcgcgatagtcaactcttttacccagtttgtgccgggacatgtgcatctgcacgagataggtcagtttgtaaaggaagagatagaaaagcaaggctgctttgccgccgagttcaatacgattgccattgacgacggcattgcgatggggcatgacggtatgctgtactcgttgccctcgcgcgacatcatagccgacagcgtggagtatatggtgaatgcgcataaggcggatgctatggtgtgcatcagcaactgcgacaagattactccgggtatgcttatggctgcgatgaggctgaacatccctacggtgttcgtttccggcggtcctatggaagccggggagtggaacggacagcatcttgacttgattgatgcaatgattaagtcggccgacaacagcgtgagcgatgcggatgttgccaagattgaacagcatgcctgtcccacctgcggatgctgttcgggtatgtttaccgccaattccatgaactgcctgaacgaagctatcggactggctcttccgggtaacggtacgattgtggctacccacgcaaaccgcaagcaactgtttaaggacgctgccaggctgattgttgaaaacgcttataagtattatgaggaaggagacgaaagtgtgctcccccgcagcattgccacccgcgaggcgttcctgaatgcgatgacgctggatattgcaatgggcggttctaccaatacggtgcttcacctgctggcggtggcccatgaagccggagcggacttcacgatggacgacatagatatgctgtcgcgcaaaacgccctgcctgtgtaaagttgctcccaatacccaaaaatatcatgtacaggatgtaaaccgtgccggcggcatcgttgccattatgggcgaacttgccaaaggcggattggtggacacggccgtacgccgcgtagacggaatgacgctggccgaggagatagacaggtattgcatcaccggcccgaacgtctgtgaggaggcggtcaggaaatattccagtgccgctgccggaaagtttaatctggcactcggttcgcaggatacttattataaggaattggacaccgaccgtgccgaaggttgtatccgcgacctgcagcatgcttacagcaaggacggcggactggctgtactgaaaggaaatatagcgcaggacggctgcgtggtaaaaacggcgggagtggatgaaagcatctggaagtttaccggtcctgccaaagtattcgactcgcaggaagctgcgtgcgacggtattctgggtggaaaggttgtcagcggcgatgtcgttgtcatcactcacgagggtccgaaaggcggtccgggcatgcaggaaatgctttatcccacttcgtacatcaaatcccgtcatttgggcaaggagtgtgcgctgattaccgacggacgcttcagtggcggcacttccggactgagcatcggacatatctctcccgaagctgctgccggaggcaatatcggtaagattcaggacggtgacatcatcgaaatagatataccgaaccgctccatcaatgtgaaactgacggatgaggagctggctgcccgtcccatgacgccggtaacccgcgaccgccaggtgtcgaaagcattgaaagcgtatgcaagtatggtaagctcggctgataaaggggctgtgagactgatagaataattgggaattccgtacccgaaaaacaataataaatagatatggaaaacttaataacaggcgcagaagcattgatgcgctctctggagcatcagggagtaaagaccattttcggttatccgggtggcagcatcatgccggtattcgatgccttgtacgatcaccggaagaatttgaatcatatcctggttcgccacgaacagggggctactcatgccgcacaaggctttgcacgtgtgtcgggcgaggtcggcgtatgtctggttaccagcggtccgggcgctacgaataccattacaggtattgcagatgccatgatagacagcacaccggttgttgtcattgccggacaggtggctacgggatttctcggaacggatgcctttcaggaagtggatttggtaggcattacgcaacctatcacgaagtggagttaccagattcgccgtgcggaagatgtggcatgggcggtggcccgcgctttctatatcgcacggagcggacgtcccggtccggtggtactggattttgccaagaatgcccaggtggataagacggaatacacgcctgtcgaagtggattatgtacgcagctatctgcctgtgcccgaaatggaaccggaagccatacaacaagccgccgaactgataaatgcggcggagcgtccgttggtattggtggggcagggcgtggaactcggcaatgcgcagaacgaattgcgtgctttcatcgaaaaggcggatatacctgcgggatgtacgctgctggggctttccgcattgcctacggctcatcctctgaacaaaggcatgctgggtatgcacggcaatctgggaccgaatatcaataccaataaatgcgatgtgctgattgcagtgggtatgcgctttgacgaccgtgttacgggcaagctggctacgtatgcgtcgcaggcaaaaataatccatttcgacatcgacccggcggagatagacaagaacgtaaagacggatgtggccgtattgggcaactgtaaggagactcttgccgcagtaaccgaattgctgaaacctgccggacataaagagtggctggatagcttcctgccctacgagcagatggaagaggagaaggttatccgtcccgaactgcatccggcaggagataagttgagcatgggtgaagtggtgcgtgccgtcagcgaggctacggacaatgaggctgttttggtaacggatgtaggtcagaaccagatgatgtccgcccgttactttaagtatagcaaggaacgcagcatcgtcacttccggcggcttgggcacaatgggtttcggtcttcctgccgctatcggcgctactttcggtcgtcccgaccgcacggtttgcgtctttatgggtgacggcggtttgcagatgaacctgcaggagctgggtacggtaatggaacagaaagcgcccgtcaagatgattttgctgaacaataacttcctcggtaatgttcgtcaatggcaggccatgttcttcaaccgccgctattcgttcactccaatgatgaatcccgactatatgaagattgcttccgcctacgaaattccggcacgtcgggtatttacccgcgaggaattggcgaaagccatcggtgagatgattgcaacagacggcccgttcctgctggaagcttgcgtagaggaggaaggaaatgtgatgccgatgacaccgccgggcggctcggtgaaccagatgttgctggaatgttagagaattatgaattataattaaaccaacgtggacaagacattatatacaatcatcgttcattcggaaaactttgcaggtttgctgaatcaggtaacggctgtatttacccgccggcaaatcaatatcgagagtttgaacgtttcggcatcctctatcaagggggtacacaaatataccattacagcctggacggataaggatactatcgagaaggtgacgaagcaaatcaccaaaaaaatagatgtgctgcaggcacactattttacggacgatgaaatctaccagcatgagattgcgctgtataagataacgacccccatactggaagagaaaccggaagtgtccaaaatcatccgtaaatacaacgcgcgcatcgtggaggtgaactccgtgttctccattgtagaaaagaacggcatgagcgaggagataaccaacctctatgaagagctgagtgctttggagtgcgtactccaatttgtacgttccggccgcgtggccatcacgacaagctgttttgaacgcgtaaacgaatatctggcggaccgtgaagcaaaataccgccggagtaaagaataagaaggactatgagtgagaataataagataggaacttataagtttgtagccgaaccgttccatgtggactttaccggccgcctgacaatgggtgtgcttggcaaccatctgctgaactgtgcagggtttcatgccacggaacgcggtttcggtattgctaccttgaatgaggacaattatacgtgggtgctttcccgcctggctgtcgagttggatgaaatgccgtatcaatacgaggatttttctatccggacgtgggtggaaaacgtgtaccgtctcttcaccgaccgtaactttgccattatcgacaaagacggaaagaagatagggtatgcccgttccgtatgggcgatgattagcctcaatacccgtaaacccgccgacctgctggctttgcatggcggcagtatcgtggattatgtgtgcgacgagccttgccccatcgagaagccctcgcgtataaaagtgacttctacggaaccggcttcttccctgaatgccaaatatagtgatattgatattaacggacatgtgaacagcattcgctatatcgagcatattcttgatttgtttccgatagagttgtataaggagagccgcatccgccgtttcgaaatggcctatgtggcggagagttattacggtgacgaacttaccttttataaggactatgtaggaaacggtacgtatgatatagaagtaagaaagaatggcggcgaagcggtttgccgttctaaagtgatatttgtagagaaataatttattaatcaatcggttggcataagccacaaataaaaattaaaactaaaaaatggcacaattgaattttggcggtgttattgaaaatgtaatgacccgcgaagagtttcctttggaaaaagcacgtgagattttaaaggatgagacaatcgcagttatcggttacggtgtacagggtcccggtcaggcttgcaacctgcgcgacaatggcttcaacgttatcgtaggccagcgtcagggtaagacttatgagaaagcggttgcagacggatgggttccgggtgagacgttgttcagcatcgaggatgcttgccagaaaggtactatcgttatgtgtctgttgtcggatgcggctgtaatgtccgtatggcctactatcaagccgttcttgactcccggaaaggctctatacttctctcacggtttcgctattacctggagcgaccgtacgggtgtggttcctcccacggatattgatgttattatggttgcccccaaaggttcgggtacgtcactgcgtacaatgttcctcgaaggccgtggcttgaactcttcttacgctatttatcaggatgctacgggcaaggctttggacagaacgcttgcgttgggtatcggcatcggttccggttatctgtttgaaactactttcatccgtgaagcaacttccgacctgaccggtgaacgcggttctttgatgggcgctatccagggattgttgttggctcagtacgaggtgttgcgtgaaaacggccatactccgtcggaagcgttcaatgaaacggttgaagagctgacccagtcattgatgccgttgtttgcaaagaacggtatggactggatgtatgccaactgttccactactgcccagcgcggtgcgctcgactggatgggtccgttccacgatgctatcaagccggttgtacagaaactgtatcagagcgtgaagtccggtaacgaagcccagatttccatcgacagcaattccaaacccgactatcgtgagaaactgaacgaagaactgaaagcattgcgtgaaagcgaaatgtggcagacagccgtaacggttcgcaaactccgtccggaaaacaactgattcccggtgtaaatcggagaatgacaaaagggggtgtgtcaaaatacgcttgatgattccgtatctgaaaagaaacaaatggcaagcggattttagtcttgacataccctcttttttattgcttatcattaatagtccttacatattcaagcagtttcttgtagaaagcatggtggcttagggtagccgcttctcccaggataaccaatttcatgcgtgcccttgttatcgccacattcattctgcgtaaatcgttcagaaagccgatttgcccttcttcattggcacgtaccagactgataaagattacatcacgttcctgtccctgaaatccgtcgacggtattgactgttatcagactgcggtagggacgtagcgaagcgctgccttttatttttccccgcaagtattgtacttgtgccttgtaaggtgagatgagtccgaagtcgatacgttcttcgagaatccggtttccgcctatccgttggatgtacgcttccagttcttgcagtaacaggtgggcttcctctttgttgatgcgtccgaatgtctccccgacaaactcttccttgaaatccatttcggatgtgtcgagccatgtaacgggagtatcccaatccaatattccccggtgacgtatttcgggagcagcttccagctctccgccatagaaccagtctgatgagaagcgcatgatgtcttcgtgcatgcgatattgtactttcaataaagatacagcagacggcttgccggctacgactttttccattaaagtccgttccagcccgccacgtgcggcttcgtaacatttgatggtaggcggaagctggcaatggtctcctgccaatactatacggtctgctttacggatggctatccagcaggcggcttccagggcttgggcggcttcgtcgataaacagtgtgccgaaacggcgtccgtttaaaaggcggtgattgctgcttacaagtgtagaggctatgacgtgggcgctgtcgaacaactcactgttgatttgtatttccaatgtggtggcacggtcacgcaggcggctcatacggttgcgtatcccttcgcgttcatcgtaactgccgcggcgggatttaccgcccagtagcctcagctctttacggatactccataattcgggataaagcggatgattttcgaaacggcgttcataagtgaaagagagcattttgtcgttgacgcgtgtggggttgccgattcgtagcacattcacgcctctgtccaccagcttttcggaaatccagtcgacagccatattgctttgggcgcataccaatacttggggttcgcggtgcagggtttcgtagatggcttctacaagcgtggtggttttgcctgttccaggaggcccgtgtacaatggctacatcgcgggcgcatagcactttattgacggcgctctcctgagtggagttcaaccaggggaagcgtaccggataaagctcacggaaaccggttttgaccgtacccaacaggatatcccgcaattcggcaagccggttgccttttgcacgcaggacatcttccagtgcctcgaacatcgtgcggtaagaagtttcgtcgaaataaagctggactccgagattatctgcggattgtatatccataatagccccggcaccgggcataatcactaccatgcgtgcttcgtcagcataactgacggtggctgtaaaattgaagtaagtgattttaccgtcggcagattgacggaagaaacagacagggcgtccgaactcaaagttatgttctatatcgaggttctcggtatgtgtaatttctattactaattgattcaacgaattatagtaacttcggcccggtgaggcaggataccagcaaactccccgcttgacttttcgggcgacgcccatgttctctgtttgtcgcttgaattcttctttttcgtattcatattccatacgcaacagaagctgttgccgctggaggtgtataataggactgtttgtatcttgttctttcatacctgcaaaggtaataaatctcagcctttaggggaagaaatgctttattttgttaaacttttccttattatgatttgtttattatattaatttgtaatatttacaatattgaattttttaaaaagagtggttatggtatatgatttagcaatgctcaaagcgttttatacactttatgaggggaaaatagaacgcattcggacgatattgcaacgtccgttgactttagcggaaaaaatcttgtatgctcatttgtacgatgagaagaatgtgaaagactataaacgcggcgaagactatgtgaacttccggcccgaccgtgtggctatgcaggatgcaactgcacagatggcattattacagtttatgaatgcaggacgtgatgaggtggctgttccttcgaccgtacattgcgaccatctgattcaggcttataaaggagcgaaagaagatattgccactgcaaccaaaacgaatgaggaggtgtataattttcttcgggatgtttcttcccgttacggtatcggtttctggcagcccggggcaggtatcatccatcaggtggtgttggaaaactatgcttttcccggcggcatgatggtaggtaccgattctcataccccgaatgccggtggtttgggaatggtggctatcggtgtcggcggtgctgatgcggtggatgtgatgacaggtatggaatgggagttgaagatgccccgcttgattggcgtgcgcctcactggaaaattaaacggatgggctgctcctaaagacgttatcttgaaactggcaggaattttgactgtaaaaggcggaacaaatgccattatcgaatatttcggttcgggtactgcttcactttcagctaccggaaaggctacgatttgcaacatgggtgcggaagtgggagctacgacttctcttttcccttatgatgagcgtatggctgcctatctgaaagctaccggacgtgcggaagtggcagatatggctactgccgttgccgaagggcttcgtgccgatgatgaagtagttgccaatccggagaaatactatgaccgtattatcgacatagacctttccacattggagccttatatcaacggaccgtttactccggatgccgccacgcctgtttcggagtttgccgagaaggttttgaagaacggctatccccgtaagatggaggtagggcttatcggttcctgtaccaattcatcctaccaggatttgagccgtgcggtgtctttggcgcatcaggtaacagagaagcggttgcatgcggctgctccgctgattgtcaatccgggttcggaacgcatacgtgcaaccgcagagcgtgacggtatgattgacgcttttgaaaaaataggcgctacaattatggcaaatgcctgcggcccttgtatcggacaatggaagcgtgtgaccgatgatcctactcgtaagaattctattgtgacttctttcaaccggaactttgccaagcgtgcggatggaaatccgaatacgtatgcctttgtagcctctcccgaactgacaatggcattgaccattgccggagatttgtgtttcaatccgttgaaagatacattgctcaatgccgatggcgaacaggttaaactctccgaaccgataggcgaagagctgccgccggaaggatttacggcagggagcgagggatatatcgcgccttcccatgcaaagacggatattgcggtggctccccagtcgcaacgcctgcaactgcttgctcctttcccggcttgggacggagaggatttgctgaatatgcctctgctgattaaaacgcagggtaagtgtaccaccgatcatatctcgatggcaggtccgtggcttcgtttccgcgggcatttggagaatatttcggataatatgctgatgggggctgtcaatgcctttaacggagaaacgaataaagtgtggaaccgttctacaaatacgtacggaacggtgtccggtacagccaaactgtataagtccgaagggattccttccattgtcgttgccgaagaaaactatggcgaaggttccagccgtgaacatgccgctatggaaccgcgtttcctgaatgtacgtgttatactggcgaagagctttgcacgtatccacgagacgaatttgaagaaacagggcatgctggcgctgacctttaccgataaggcggattatgataaaattcgggagcacgacttgctttccgttgtcggcttgaaagactttgctccgggacgtaacctgaaagtggtgcttcatcacgaggacggcagcaaggagagcatcgaagtacaacatacgtataatgaacagcagataggctggttccgtgccggctctgcattaaatgcacgatagaatatggaaaagattactgtaccttttattacaggtgacggagtaggggcagaggtcactccgtccatgcaggctgtggtggatgcagccttgaagaaagcctatggagacaaccggagtatcggatggaaagaagtgctggccggtgagcgggcatttaatgaaacgggttcctggttgccggaagaaacgatggaagcattccgcacttataaggtaggtattaagggaccgttgactacaccggtcggcgtcggtatccgttcgctgaacgtggcgttgcgccagacactcgatttgtatgtgtgcctgcgtcccgtgcgttggtataaaggcgtagtttcgccggtaaaagaaccgcagaaggtaaacatgtgcgtattccgtgagaatacggaagatatttatgcgggtatcgaatgggaagccggaacaccggaagccgaaaagttctatcgcttcctgcatgatgagatgggtgtgaccaaggtgcgctttcccgaaacttcatcttttggcgtgaaacctgtgtctaaagagggaacggagcggctggtgcgtgcggcttgccgttatgcgctcgaaaacggtctgccctctgtaacgctggtacacaaaggaaatatcatgaagtttaccgaaggcggcttcaagaaatggggctatgagctggcggagcgtgagtttggaaaagatatagcggagggacgtcttgttgtcaaggattgcattgccgatgcctttttgcagaataccttgcttgttcccgaagaatattcggtcattgccactctgaatttgaacggtgattatatttccgaccagttggctgctatggtgggtggcatcggtatcgctccgggagccaacatcaattacaggacggggcatgccatttttgaggccactcatggcacggctcccaatattgccggaaaagacattgtgaatccgtgttccatgattctttcagcggtgatgatgctcgaacacctgggttggaaagaggccgccttgctgatagaggaagcactggagaacagtttcacagaaggtcgtgctacagtcgatttggcccgcttcatgcagggtggtgtcccgttgtctacatcggcttttacacgggaaatcgtgaacaggatagaagcttccgcaaataattcctccataaaccagataaaataaaatattatgaagaaagaatatttgatttacaaactttccgaagacctgaaagaagcgacccggattgagaacgaactgttcaagaagtttgatgtgaagcgcggattgcgtaatgaagacggcacgggtgtgctggttgggctcaccaagattggcaacgtagtggggtacgagcgcattccgggcggaggtctgaagcctattccgggcaaattgttctaccgtggctacgaccttgaggatttggcgcatgccattctcaaagagaaacgtttcggctttgaagaagtggcgtatctactgctttcaggccgtttgcccgacagggaggaattggcttctttccgtgagctgattaacgataatatgccgttggagcagaaaacgaagatgaacatcatcgagcttgaagggaataatataatgaatatcctggcgcgaagcgtgctcgagatgtatcgctttgacccgaatgccgatgatacgtcgcgcgataatctgatgcgccagagcatagaccttatttcaaagttccccaccatcatagcctatgctttcaatatgcttcgccatgccactcacggccgttcgttgcatatccggcatccgcaggagaatctttctctcgcggagaatttcctgtatatgctgaaaaaggattatacggaactggatgcccgtacccttgacctgttgctggtgttgcaggcggagcatggcggcggtaacaattctacgttcaccgtacgcgtaacgtcctctaccggaactgatacctattctgccatcgctgcgggcatcggttccctgaaaggtccgcttcacggtggcgccaatatccaggttaccgacatgttccaccatttgcaggagaatatccgggattggacgaatgtagacgagattgacacttatttcacccgtatgctgaacaaggaggtatataacaagacgggattgatatacggtatcggacatgccgtctataccatttcagaccctcgtgccatacttttaaaggaacttgcccgcgaccttgcccgcgagaaagggaaagagcgcgagtttgctttccttgaattgctggaagaacgagccatcgaagttttcggccgtgtgaagaacaacggcaagacggtttcgagcaatgtggatttttactccggtttcgtatatgaaatgatcgggttgccgcaggaaatatttactccgctgtttgccatggcgcgtatcgtgggctggtgtgcacatcgtaatgaagagttgaacttcgaaggtaagcgcattattcgtccggcatataagaatgtattggaagaagtagcatacattcctattaagaagcggtagatccgtttcaaagcacagacctcggattgccgggtcgtataaggtatcgttgttgcggttggaaagccggacagcgataccttattcattttcccgtggcggaacggataaatatccacgctctttgtgttatccgtttctgtatgtttttgataattgctgcgggaaaacgatttgattgttacaggttttccctatatttgtcacacttaaacaaaagaacatgagcgaagaagggtttcatctgtttttgggagtgatgtgcgtcattgcgctttttgtgttcatcgctctttatttcgtcaaagccggatatgggatgttccgtactgcgtcgtggggatattccattagtaacaaggcggcgtgggtattgatggaagcgccggtctttatcgttatgttttggttgtggggcaggagcggggcaggctttgccgtgccggtatatcttttcttcctgctgttccaactacactatttccaaaggtcgtttatttttccttttctgctgaaaggaaaaagccggatgccggtaactattatgatgatgggcattgtatttaatgtactgaacggaatgatgcaggctggcggtctgttttactttgcttccgaagggttgtattccggtggttgggcttatttgctgaagacccatgcgtggtcggggcttctgttgttttttgccggtatgcttatcaatcttcattccgaccatgtgattcgccatttgcgtaagccgggcgacacgaatcattaccttcctgagaaaggtctttatcgctatgtcacttctgccaactatttcggtgaattggtagaatggaccggttttgccatacttactgcttcgcctgccgcatgggtgtttgtgtggtggacttttgtcaatctcgttccccgtgccaatgccatttacggccgttaccggaaagaattcggtgatgaggcggtaggaaaacgcaagcgtatcataccttatatctattgaaaggacaaaccataaatcataaatcaggaaactatcacatggaatcaaaattattcactccggttactttcggaccgctgacattgcgcaaccgtaccatccgttcggctgcttttgaaagtatgtgtcccggaaatgctccttcggacatgttgctcgattatcaccgttcggttgcggcaggaggcatcggtatgactactgtggcttatgcggccgttactcagagcgggctttcttttgaccgccagttgtggatgcgccctgaaataattccggggcttcgcaagctgaccgatgcgatacatgcggaaggtgctgctgccggaatccagttggggcattgcggaaacatgtcccataagagtatttgcgggtgtaccccggtcggtgccagcagcggtttcaacctgtattcacctacttttgtgcgtggtttgcgtgccggtgaactgccggagatggcacgtgcttacggaaaggcggtgaatctggcccgtgaggcgggatttgatgcagtggaaattcatgccggacatggctaccttatcagccagttcctttcgccttcgaccaatcatcgtaaagatgaatttggcggttctctggaaaaccgcatgcgctttatggatatggtgatggatgaagtgatgaaggctgccggcagcgatatggcagtgcttgtgaagatgaacatgcgtgacggtttccggggcggcatggagatagatgagacgatgcaagtggccaagcgtcttgaatgctcaggtgcacatggattggtattgagcggcggttttgtaagtaaagcgcctatgtatgtgatgcgtggggaaatgccgattcgcagcatgacacattatatgacatgctggtggctgaagtatggagtacgcatggcgggcaggtggatgataccgtctgtgccgttcaaagaagcctatttcctggaagacgccctgaagttccgtgcagagctgagtatgccgttgatatatgtaggcggactggtgtcgcgtgccaagatagatgaggtgctggacaatggttttgaggctgtacagatggcacgcgccctactcaacgaaccgggctttgtgaaccgtatgcgcaaggaggagaatgcccgttgcagctgtaggcatagtaattactgcatagcccggatgtattccatagaaatggcttgtcatcagcatttgcaggaagaactgcctgcctgcttgaaaaaggagatagagaaaatagaagcgaaggggtgattgaatctttcttattattggcaatttatacttggtaaacatgaaacttgctatcataaccggtgcagacggtggtatgggaacggaaataacccgtgctgtggctacggccggatataaaataatcatggcctgttaccgtccggaaaaagcggaaagggtaagggatatgctggtgcatgacaccggtaacccatatattgaggtattgggcattgacttagcttcgcttgcatctgtggcggcttttgccgaaagaatgttgaaaaggggtgataccgtcagtctgctgatgaataatgccggaacaatggaaacagggcgtcacatcactgaggatggtttggaacgtacggtgagtgttaattatgttgctccttatttgctgacacgcaaacttattcctctgatggaaaaggggagccgtattgtcaatatggtgtcttgtacttatgccatagggcgtctcgactttccggatttcttccatcttggaaagagaggaggtttctggcgcattcctgtttatagcaatacgaaactggctctgaccttgtttaccgttaatctggcgaatcgggtcaaggaaaaagggattgtggtgaatgcggccgatccgggtatcgtatctaccgatataataacgatgcacatgtggttcgacccgctgacagatatcttattccggccttttatccgtactccccggcaaggagctgcaacagccgttcatctgctgctggatgaggatgccggaaaacgtacgggaactttaaatgcgagttgccgtcccaagcatctttccgggaagtatacccgccatgtgcagatgcaggagttgtggaacaggacggagaagattgtggagaagtggttataaatccaaaaaacggatagaacacttgttgaggaaaatttaaagaacctcttgcattatgataatttttcaggcacggagtgcatggatttcacggttccggtttgcaagaaccatgaaatctgtgcactccgtgcctgaaagaaaatgttaaaatcacttcggccctcttgggtttatcctatcgggactttattaaatggaaagttccctcagtacattaaccaggtctttcttgatcggcttgtcgtttttgatggctttcgtgaaaggtacataaaccacttcatcgtgttctatgcctatcatcacattacgttgtccttccatgatggcgtcgattgcggcagcacccaatcggctggcaaggatacggtcgtgtgccgtaggactgccgccacgctgcaagtgtccgaggattgtgacgcgtacgtcgtattggggatattcgtttttcacacgttccgcatagtgcattgcaccaccggtcagttcactttcggcaacgagcacgatgctgctgttcttagacttccggaaaccgttcttgatgaactcttccaattggtccacttccgtgctgaattccggtatgatggcagcctcggctccggatgcgatagcgccgttcaaggcaaggaaaccggcatcgcgtcccataacctcgacgaagaaaagacgttcgtgagaagttgcggtgtcgcggattttgtctacggcatccaaaatcgtattcagggcggtgtcgtaaccgattgtggtatccgttccgtacaggtcgttgtcgatggttcccggcagaccgatacagggcacatcaaattcttgcgcaaagatgcgtgcaccggacagagagccgtcgccaccgataaccaccagggcatcgataccctctttcttcatgttatcgtatgctatctgccgtccttcgggcgtggtaaactctttacagcgcgctgttttcaggatagtaccgcccaattggatgatgttacttacattctggctcttgaattctttgatttcaccggttaccaagcctttgtaacctctatatatgcctttaacctgaagtccgttgtagatagccgcacgtgttaccgcacggatagccgcattcattcccggagcgtcgccgcccgatgttaaaataccgatacacttaattgttcccataacaatctctttatttagtgttaataattaccttaaaaaatctgctcgcaaagataacaaaagctttttaaattcgtgattttattgccttggatatttcttccatcagccatttgggagtggaagtggctccacaaataccaatggactctgtgccaatgagtaaccggttgtctatctcttccgcactgtcgataaggtgcgagttgggatttaccttcttgcattcgttgaacaggatttttccattggaacttttcttgccgctgacgaagaataccaaatcgtgcgaagctgcgaatttccggatgttgggaatgcggttggctacttgccggcatatggtgtcgtaatattcgaaagtgacatcggaggatatatgttcttttatgtattccacgattttttgaaattcatccagcgacttggtggtttgcgagtagaggcgtatgctcttgctgaaatccagtgacttggcttcttccagcttttctataacaattgcttttcctgtggtttgccccaccagtcccaggacttctgcatgtccgttctttccgtatatgacgatttgtttgtcctcattgtcttcctggatatactcctgcttgattttcttttgtaagcggagaaccaccggacaagtggcgtcgattatttcaatattgttgcgcctggcggttatataggtttcgggcggttcgccgtgtgcccgcaataaaactttggcattatgcaggcggttgaactccccgtggttgatggtgataagccccattgctttcaagcgctccacttcacggctgttgtgcacaatgtctcccaaacagtataatgttccgcttttggataactcttcttctgctttattgattgcggtaactaccccgaagcagaagccggaaccttcgtctatttccacttttgccatattgcagctttttgcgttatgatttgcacactttttcgaactgttctgccagccattccttttgttgggaaatggtcatgtggctgttgtcgagcagcagtgcgtcgtcggctttgcggagcggactcacttccctgttctggtctatataatccctctgcttcacattctccaggatttcgtcgaaaccggcttcctctcctttggctttcagttcatcgtatctgcgctgtgcacggatttcgggagaggcagttacgaatatcttaagttcggcatccggaaatacggtagtgccgatgtcgcgaccgtccatgacaatgcctttggctttgcccatttcctgttgttgggccaccattgcttcgcgcacaaagtcgagggcggcaatgggactgacgcgggaggatacttccattgtgcggattttcttttccacattgatgccgttcaggtaggtgtcgggacgtcccgtttccgggttcagctgaaaggatatgcggatgctgttgatctgctttttcagtttttccgtatcgatgccctcggctgtgaagataccgttctccatactatataaagtgacggcacggtacatggctccgctgtcgatataaatatagccgatttcacgggcgaggtccttggccattgtgctttttccgcacgaagagaagccgtcgattgcgattgtaatctttttcatatgaaatgattttataccataatttatataggaatctctctctcggtagatttttttgaacgtttcatttaaaattcttgccaaagatacggtatttttaaaatatctcgttacttttgcgctacaaaagctgacgaaggcttttgaagaattaaaaaaataaaaatgccttgtttattgtgtaaaaaaacacagccaggcaagaacaatcgtgggaaaagtgctatatttgcccaaaatgagaaacactaataattatagtataaattatggaaattaaaaagacacctaaggcagacttggagaacaaaaagtcgacttggctacttgtcggttacgtgattgtgctcgcgtttatgttcgttgcattcgaatggacaaaacgtgatatcaagattgatacgagccaggcaattaccgaccttgtatttgaagaggaaatcattccgattacggaacaacccgagcaggtggctccaccgccccccgaagctccgtcgattgcagaaaccctgacaatcgtggatgacgacgcagatgtggaggaaaccacgatagctacatctgaagaaaccaatcaggctgtggaaatcaaatatgttcccgtagctgttgaagaggaagaaccggaagaacaaactatctttgaggtagtagaacagatgccggaattccctaacggtggtatggctggtttgatgcagtatttgagcaagaacatcaaatatcctactatcgctcaggaaaacggaactcaaggtcgtgtaaccgtacagttcgttgttaacagagacggtagtatcgtagatgctaaagtgcttagaggtgttgacccgtatttggataaagaggcaatccgtgtgatcagctccatgccgaaatggaaaccgggtatgcagcgtggtaaagcggtacgtgttaaatacacagtacctgtgatgttccgcttgcagtaattttgttttttttagttaatatatttaaatatcgcgtaaagaggttgcttttaggcagcctcttttcattctctgccattcctaatttgaaatacttatgtttacagcttccgaacttctcgataaaataaattcccatattgcggatttgcagtttgaacgtactccgaaagggttgtacgacccggttgcctatgttttgtccatgggtggaaaaagaatccgccccgtgctgatgctgatggcttataatctttataaggaagatgtcaggccggtattctcaccggcaacaggcatcgaggtctatcataattatacattgctgcatgacgacctgatggaccgtgccgataaacgccgcggaaaagaaacggtgcataaggtatggaatgataatacggctatcctttcgggtgacgcaatgctggtgctggcttatcagtttatggcggaatgtccggccgaacacttgaaggccgtgatggatttgttcagcctgacggctcttgaaatttgcgaaggtcagcagatggatatggattttgagcagcggagcgatgtgaaggaggaggaatacttggagatgattcgtctgaaaacatccgtgctgctggcggcaagtttgaaaattggagcattgttgggcggtgcctctgctgaagatgcggaacggctgtatgactttggcatgaatatgggtgtcgcttttcagctgaaagacgatttgctggatgtgtacggtgatactgccgtatttggtaaaaatataggtggggatatcctgtgcaacaagaaaacctatatgttgataaaggctttggaacatgcggataaggagcaggctgcgcaattgaagcattggataaccgttacggactttgacccggctgagaagatagaggctgtaaccggtttgtataaccggataggggttaaactcctttgtgaaaacaaaatgtcggaatataacaataaggctttggaaagcctggctgccgtgaatgtgacggctgagaggaaaagagaactggataagcttataaaggagttgatgtaccgggaagtgtaattgtcagtagccgattaggatgccttacagaagattaccaaatacagatcaggcaagaatacgtgcgttgaaagccgttgttgccaaaggtgacacatataatgtgtatgatttggctgtgtctctgaaggtacttacggatgcccggaatttcctggtaaagtttgaagcggcgcattcgtattatgtggaatgttttgagcgtcagtcaaaggcgggacgtaagcatcaggcgaatgtaaagactgcccgtctttacatatcgcattttatccaggtactgaatctggcagtgattcgttcggaggtgcgtaccgctcataaggagttctacggcttggatatgagaaacaataatgttccggatttgtctacggaggcagcccttgcagagtggggacgtaaaatagtagaaggcgagagccggcgcatttctcagggcggaattcctatttataatcctaccattgccaaagtcagggtacattatgatattttcatggagagctacgagagacagaggaacttgcaggcgctgacagcgcgcagtctggaaactcttgcttccatgcgctccgaagccgatgctctgattctggatatctggaaccaggtggagcggaaatacgcagaggttatgccgaatgaaaaacgtctggagttgtgtcgcgcttatggcttgatttattattaccgtaccggtgaaaaagaagagattgcaaaatgaaattagtagattcacattcccacctttttttagaggacttccaatcggatttgccgcaggtgatgatgcgcgcccgggaagcaggagtcacccatatttttatgcccaatatagacagtaccactattgaccccatgcttaaggtctgttcggagtacaaggggtattgttttccgatgatagggctgcatcccacttctgtggatgccggttatgagaaggaactggctgttgtggccgaacatctggcaatgccggacggttatgtcgcaatcggtgaaataggcatggatctttattgggataaaacttacctgaaggaacagcagattgtctttgaacggcaggtgcggtgggcgttggagtatggattacccgtagtgattcattgccgggaggcattcgactatatatatgatatattgaaaccgtataaaacgtcttctctaagggggattttccatagttttacgggaacacgggaagaggcattccgtatgctggagttttctaatttcttcattgggattaacggtgtggtgacatttaagaaatcgggattgccggaagttttgcaaaatatccccttggaacggattgttcttgaaaccgattctccctatctaactcccgtgccgaaccggggtaaaagaaacgagagtgcgaatgtaaaggatactctgttaaaagtagcggaaatatacggaaatttgcctgaagaaataggccgtatcacttctgaaaacgctttaaaagtgtttggaatgctcaaataacgttccgaagattttaaagtttattaattttgagattttcttgcggataaaactttgagaatgcagtggaagaacaaaaaaaagaatacatttgtagctgaaaacgctcgcggttcgcattttttttgtaatttgcacccgatttcagaacagatgttgattggagagatgctcgagtggttgaagaggcacgcctggaaagcgtgtatacccctaaagggtatccggggttcgaatccccgtctctccgcgaagttttaaaataagagaagaacaataaataaacataataagtaatttaattaattaatcttaaaaattagacacacaatgaaaaagttatttgcaattgttgctgtgatgggagtcttaacatttggctcaactcaacttgctcaggctcaagatgctcctgctgctgaacaaacagaacaagctgctcctgcagcacaagcagctcctgctgatgaagctgccgctcctgttgtagctgaagaaggcggtattcacaaagaaatcaagactaaatttattgaaggtactgcatctttcatgagtttggttgccatcgcattggttatcggtcttgctttctgtatcgagcgtatcatttacctgagtttggctgaaatcaacaccaagaagtttattgccgctatcgaagctgctttggaaaaaggtgatgttgaagctgccaaagacattgcacgcaatacaagaggtcctatcgcttctatctactatcagggtttgatgagaatcgatcagggtatcgatgtagttgaaaagtcagttgtatcttacggtggtgtacaggctggttacctggaaaaaggttgctcttggatcacactgtttatcgcaatggctccgtcattaggattcttgggtactgtaatcggtatggtgcaggcatttgataagatccaacaagtaggtgatatctctccgacggttgtagcaggtggtatgaaggttgccttgattacaactatcttcggtttgatcgttgctttgattctgcaggtattctataactatatcctgtctaagattgaagctttgaccagcgaaatggaagattcttctatctcactgttggatatggttatcaaatatgacttgaaatacaaaaaataagtaaaatggctaagttatcatataaagtatcatactacgtactgtacgtaatgttcgctgccattctggtagtgttgggcttgttctacttcggtggagatgctcagggcgatgcagtacttatgagcgttgactctgaaatgtggcaacccgcccaaaccgatgcactgctcttcttgatgtacggtttgtttggtatcgctgtcgttgctacagtggctgctttcctgttccagttcggaactgccttgaaagataatccgggaaatgcattgaagtctttgatcggtgtaatcgtattggttgcagttgttgttatagcatgggctatgggtagtgatgaaccgcttaatatcccgggttatgacggtacggacaatgttccgttctggttgaagatcactgatatgttcctttattctatctacatcctgtttggtgcaacagtgcttgctatcatctttagtagtattaagaagaaattatcataatcaattgagataactcaatttaaagagtaattacaatggcaaaaggaaaaagaaaagttcctgatattaactcaagttctacggcggatattgctttcctgttgttgatcttcttcttgattacaacgtcaatggatactgaccgtggtttggcaagacgcttgccgccaccaccggagcagaaccaaaagaatgacgatattaagttgaaggaacgcaacgtgttgcaggtcttcctgaatatgaacgaccagttaatgtgcggaaacgattatatcacaacagatcagttacgtgctaaagcaaaagaatttattgccaatccgtataacgatgaaaccaaaccggaaaaacatgcaaaggatattcctttctttggtaacatgatgattacggaaaagcatgtaatttctttgcgttgcgaccgtggctcttcttataaggcatatcttgctgtacaaaacgagctggttgcagcatacaatgagttacgtgatgagttggctcaggaaaaatggcaaaagaactatgttgatttgaatgacgatcaacaaaaagcaattcgtgacatttatcctcagaagatctctgaggcagaacctaaaaaatacggagataagaagtaatgggaaaatttaataagactggtaaaaaagaaatgccggcgttgaacacttcttctctgcctgaccttatcttcaccctgttgttcttcttcatgattgtaacaactatgcgtgaggtaacattaaaggttgagtttaaggttccgcaagctacagagttggaaaaacttgaaaagaagtctttggttacgtttatctatgtaggaaaacctactgctgaattccgtaagaaattaggtaatgaaagccgtatccagttgaatgacagttatgctgaagttgcagcaatccaagactatattattggtgaacgtgccagtatgaaggaagaggatcagccgcagatgacagtgtctttgaaagttgaccaagatacgaaaatgggtatcgtaacagatatcaaagaggctcttcgtaaagcgtatgcattgaagattaactattctgcgcagccgcgtcagtaaagttagttcagactatattgaataaaggtcgcttgtgaaaacaggcgacctttattttattatgtatgggaactttggaagaatgagtgttcctatttatttagtgttgtatacttcccgatagatgcactttttaacctgttcgaagtctttatcgcattctaaatcgccataagccattaatagcatgggaaggtaatcatctccggatttataaggcggttgcatgtacggcttttcccataatgtaaaaccttgccgtttgtagaaattgattcggcgtattgccatttcttcttccggcatttccacttccaggataatgggtttctttagctggtggcataaatggtttaaaacgtttttgccatggcctccattgcgttgagacgggtcaatggcaaaatgctctacatagcagaagtgtccgaaatcccagtaggtaataaagcctaccggagtatttttatggagaataatgttacagtaaaagtgcggtttgctatctgtataattacgcaattcttccaatggacgatattcttcagaagggaaagaagcagtcatcaactgctccatgtacttgtacaaggctgcatctgtggtggtgatgcgttgaaatttaatcataagcaggttctttaaaatttgtttttttattcggtataaaactcaataattctgcgaagagcgcgttggcacacagggcagaaagccggatattcattggtgcgcatgcggcaattctctgccggtcggaagatccctttcgctgaataaccgccgccttcatacacgcctatcggatagttttcgcttacctctgccggagtgggaacgggagtattttcactaagcatgtccttccacttggctgcaaagtccacttgtgtactgatgttctgctcccacggttctatatccaagggataggtatcggtcatgacatcattatcatagaagtattcatcggcaagtccgccgaaactgtgtccgaattcatgtactactaccggccggaacatcggatgatgggctgttgtgagggtgtatgagttatagataccgccaccgccatattcttccgtattagccaatatgataatgtgttcatagggtattccggctaaagcatcatgaattgcttttacgcgtgatgttgttaaataacggtcggaatagaacgtgctgaaatgtgaaccgaaggcagtatgtttccactcgttcaatcttggcacgctgactccgctatctgtggaaggactggctacggctactacattgaaccgtttcttcatggatttgaaaggttcgtggtcgaaaatgcttttgcaagcgatatctgcatcttcatagaatgtctgcatttcttggagtgtatatccttctgcaagaatggctacatcgatgcacttttccggactatcgttgtgcagcaggtatttatgcggtgtgatgtgtgaatttcctttttgctctatcaatacatcgtttggatgcacgatgtgtttcatggacgcgcggacattgcggcgtgggtcgagcagggttatttctatttcaaccggttggagcgggtagggaaggagaaatgtattttcaaatcctttagttacattccgggcttcgtccgtttccagccattcctggaagagtgaggagaaagaggtagtataaatagtctttccgctggctgcattgcgcataataatctgcccgttgccttgcaacgggagttccgccagatgatgctttcttcctgcccaggtggggagagcggataacccgttcagacagatagcttgcccggatgcattgccgttaaagatataatcgacgcgaagggttttatctgcaaaatggtcggcaaagacttgtgcgcgggtagatgctacggctattaaacagagtaagaataagatatgctttttcatgtctataataatttaatcatttcacaaatatacgattatttcggcattatcacatttaatataaatgatagacataaaactctattttgaattccatatctatcatttatattaaatgtgataataccgaaatataataaatgtctactatgggatttggattattttatgacggctacaaaaccaccacgtggcaaacactctattgtcaggtctgatttaacatttgccaaagggatattttcttcaatggaaaaatgcttgttatctataccatctttgaatatagagattttcttaccgttaacagctattttatccaatgatatatgaagtgtttttgtttcattagtgccattgatgcctccaatataccatacgttgcctttacgacgtgccaggattacttcttctcccggataaccggctaataattttgtatcatcccaagcaacaggcagttctgacaaaagtctcttcactggttccggtaagccataataaacagagggtctgtccggcatatgctgcagcgctgattcaaaaatgaccggcaatgccagttcatgggcatatgaagtaatatgaggatgttgagaattggaaaaagttcccggagtataatccatcggccctacaacatttcttgtaaaaggcaaagtcgcgttatgctcggcagcccgattggttaatattggagcgttattataccattcggcgccatataccccctcaatcgacatcatgtggggatatgtacgttgccaccctcgcggaatagtagccccatgaaaattaagcattagtttatattttatggcatcttcgagcagatctatatagtaattcatggtagaaacactgtcacccgagaagaagtctactttaataccggcaattcccatttcgctcagccatgcgtattctttttcccggtcttgctttttatttaaacggaacaagggaccgggaccaatccagtttgtacttgagttataccatagcaaaggcttaatacccttgtttaaagtgtacttcacagcatcttgaagattgcctccattgctcatttcatcccattcccaatcaatcaagttgtaaggccaatgcatttcagctgccaaatcaatatactctttgactttttgataatccttagagccatgattatatgcccagtatatccaggacaccatgccgggatttatccattctgtatattctactttagaagggtcagagacgtcagttaccagtgttgactccacaatatcggacaaacctcctataatgagtaccctccaaggagaaacccatgttctttcagcgacctgttttttatcggcaagtttcacttggtatctgtcattgttatcaccgttgaataaaagagaaccgcaatgtccacgtctgatatttgcttctgttatcagcataaatacagaatcctgcaactctacgagtccgggatatccccaagagttaactttgggacggtcggggagttttccatctgttgataccggaaaaaacttttcgtatccggggtcgtattgctgcatccatcttttggctccttgcggaatattatatgccgtatattcatcaacgacatattctttgtctgcaatagtattaatttcatatctgaaaacgaccccattgtcatatactctgaatgtaatatccaaagtgtttccttcttggttttcaaaagaataggtcctttcaaaggcttcattgatacaatgactgcgttttcccgttatcatcttgtaatcatcgacgattcgttttgtcttagaaacagatttcagcttcaaatttccataaaacttctgaacgtctgtttccaaccccagttctgtttgggaaaggatagtttttccgtcatagttcacagaaaaagtaatcttgtcataagcctttccctccataggctccactgtaactcctagtttaccggtaggagaggttacatccaatgtttctgtactgcatgagctgatcatgatgacaactagtacaaaccatatatgtcttggtaaatacatatcgttttttattttcttgtatcgttaaacaaacacttttttattcttgcaataggttatggcaattggattttcagccttttaccttgatatacgactgttttttccgcagacggacttatgatacggaaagtcctgttggcctgcatgccgggatattctccttgtcgttcttctatcgtcaatactcgtttacggtcattccagttaaaacggatgttgctatatgctcctttttcataattgtaattatctccctcatcctcgtataaaatgaatgaagcgtcttcacccggataaatgtgtatctctaagggggcgctaagattttccgaagcatattgctttttcatgcctaacggtaatatggtaccggcttttacaaataccgggattttctctattgatgccggaatatccacgtattgtcctccctcataggcctttccattccaaaaatcaatccatcctgccgcatgttcaggaaggtaggttttccagctttgtacattgctttgggttatgggattaatcagtaaggagtttccaaacatatactcattctgctgtttcaaagcctccttatcttgtgaaaaatcaaatatcagcggacgcatgaaagtacctccttggtgtgaaactaatgcagtatgtgaatatatatagggtaataggcgataacgtaggtctaaaaagtcggaaacaatgtgttccacttgttctccgtaccgccaaggctctgtctgactcatataaccatgaatacgcatcaatggcaggaaggttccggcctgtatccaacgcaacattcgttcttggtaatctttattcgtatactggtcggaagggcggaaaaagccgcctgcatcataggtccaccaaggcagaccggcagccatttgccctaatccgccagctatttgccgacgaagtgtttcccagtcattgcctacgtctcccgaccatgttactgcaccatatcgttgtataccagagaacccgcttcgggttaatatcatagcacgccgatccgggtcatccttacgtaagccttcatagacggttttattcacaaaaagcggataaacattgcggtagaattcaccaggggtttccccattgtttattcgccggttcagtaaatcatcattttccggttcggtagcgtcctgccaccacgcatcaattttgtagggcttcaatagtttactgctaaaattatgccaataaaaagctgctgcatcaggattgaaaaaatcaatccaatctgtgccgggaatgtaaaaacctttagactccatttgctttccaagtgccgattgcttatctattttagaccaaacggacaacatcaggtgtatgttcatgttatgaagctcacgtaccattttgccgggatccggatatttgttttcatcgaattgcatggcattccacccgtactttccccaccattgccaatcttgtacgatcacatccacagggagcttccgtttcctaaattcatgtgcattttccaacagctccgcttgtgtattataacgttcccggcaatgaatatagcctaatgcccaaagcggcaacataggcgctttgcctgtcagctgacggtaaccggctattatttcatcggcatttccggagaatacggtatagtccaaagaatgtgctaccggagaacggaagacagtctcatcagttacttgtctccaatataatatgggggaatcttcttttacgccctgtacttcaacagtatgttctcctttcgataattctactataacggaagttgtaggagggagccacaaattattcacatcgacaattttatttccatcaatagcgatgtaatgtttgcgtgccatacgctgccctacatccaacagcaatccgtactgtccgtcggccggaacactgaatgttgctgtgaatgacttgaagagacgagtctcacgtttattgccttttgtacttgtcgcgtccactgtaacggcttgtccctctgtctttaccggtaataactttacagactcgtcagcaggattaaagtctgtcagaccatagttgttccacaaaatgccatatcccttgttggaaagaataaaaggaattgcgatctgtgtattaacttgtgtaaggcgtctgctcagtccccgcacatttaaatagccatcttgaaattgtccggtgccaaacaagtattcatcagccggtgataagaaatgttgttcggctaaaaaggccggttcgccttgaacagtagaacttttcaataaacgccctccttctttttcctgcaagataatttgccctttatcatcggtaaaagtcagtgtatgacgctgtttgtcataaactacaatcattttctcaagtgaaagtttcagtgaggtattattctctttcactttatatgcaggagacgctacatcttctgtatagattaattcttcttttggaacagcctgtcctttggtgaaccttacgcgcaccgtattctgattgagcggttgtaaagaaagctttcctgttggcaattcgatattcacacgattgcttttaagagaatcattttgggcaaaggccgtaaagcaaccaatcagcaaaacgaataaaaacagtgtttttcgtgtcatgttctatgctttatttctgtgaatgagtgacttgaattacagtgtattgggaagtacacgattgtgctaatggctgttctttactcgaatgcccaccagtccaacataaataggttctttttcagttctttcccacctttaaaaacaaaatagagatcgtgtacgccgttcaagttcacaacagacgtcgtaaactcgcgaagttcactcttcgtatgtgatatattcactgtgccgacacatggaccatctttttggtcgatgtgaatttccaatatgccgccatataggtgagcagaagcggagactttaaacgtcttggctccttttccaaaatcaacacctttcaccattaggtattcgccgtcatctatacttgttaccagttggttccagcgttcgtgactccagatattcttgggagtggtcttcagtccgaagccccaagccatcgtttctgcttctactttacgatagggattgaatttctcaatctgttccaatttacattcgtgaaaataaggcagcatgcggatggtgccgttagggttatactccatttcagcaaccgacaccgagcgacgttctgcgtgacggcttgtttccaaacggaagatatcatagttttgaccaaagcagtaagatttacccttgtaatcgatgataccagggtgattgccacgagtccgtggtgtatggtccattatatgccctttatactcccatggtccaagcgggtttttactcatggcatagccgataccctcaggacagcatgtagaggcaaaagctaaatagtagtgttcgttgcgcttatagaaccaaggaccttcctgataatcctcaatatggggtaactccatgatttcgcctgagtaggaaatcatatcttcattcagtttcacacaatagagattcgggttaccccaatacatataggcctgaccgtcatcatcaatatatactgtggggtcaatatcataccagtgttccttttgccataccagcggcttgtttatgggatctttaaaaggaccgtaaggggagtctgacactagtacaccaatgccgtttccatgaatggggcaatacatataccacttgccgttgcggtgaactacttgctgtgcccaagcaccgttatcgcctttgtaccatttgaaatctttgagagaggctacggcgccacgatcttgccagttcaccatatcggtagaagtatagaggagccaatccttcatgtgaaaattctctccatcatcctcatcgtggctggtaaaaagatagacagtgtcattgtatacaataggagccgggtcggcagtgtacttggtttggatgataggcatgttcaatgataattcttgtgataaggaagttgtcgagagtaacgagcaaaatgctaaagaaattaaagtggctttcatatttgtaaataatttaattatgtttttcatgatttgtgttttctattacaaaggaatacattttgtattaatctgcttcaaaagtatgttacatctttttgtctgtgtgttatataataatcctggcagtctctgaatatatgattattctctttttagcaagaaaagttataattcgtatttttattcatgaaaaaatcgctaactttgcacattgccgtagcggaatacggtaaaataatttatttaattaattattgagattagaaatgggacatcatcaattggatactttagacgagcagatattgcagctgattgccgataatgcgcgtattcctttcctcgaagttgccagagcttgtaatgtatccggagcagctattcaccaacgtattcagaaactgacaaatctgggtatattgaaagggtcggaatatgtcatagatccggaaaagataggatatgagacttgtgcgtatatcggaatctatttaaaagatcccgcaacttttgatgccgtgacaaaagcgctggaagccattcctgaaatcgtggaatgtcactttactaccggtaaatacgatatgtttattaagctgtatgcacggaacaatcatcatttgctgagcattattcatgataaattgcaaccgttggggttgtctcgtacggaaacgttgatttcattccacgaggcaattaaacgtcagatgccgatagtgatagacgatgaggatgaataatcctaccggttatcggcggatataattgacaaaagcataagggcagggatgtttttcatctataggatgggattccctgcttttttcttgccatatttcaggggttacttccggaaagtaggcatctgcttgaggagcttcggcatctatctctgtcaggcagagtgcgtctgccaatggcaaagcctggcggtatacgctggctccgcctataatatagatttgttcatcctgttcacagtgcttcaaagcttcttcaagagaaggaaagatttccgcacccggacatagggtgtcgggacgggtagacaatacaatattgcgtcggtttggcaaagctcctttagggagtgattcgaatgttttccgtcccatgatgatggtgttcccggtagtaagcgctttgaaacgtttcaagtcattgggaagccagaataacagtttgttttcataaccgatagccatgtgtcggtctactgcggcgataatgctaatcatattgtctgatgtaatcaagtggtcttttaatgatagaccttaattccgcaacactattacaaatataactttttaagtacctgagcaacaaaaagttgctcaggaatttgccatgtcagatttttcacctatcttagtgttgcaaatcaaaatatgtatcaaacccgacagacatggcaaaggtagcaattaaatccgagaaactcactccttttggaggaatattttcaataatggagcaatttgactccagactctcatctgtaatcgactcaaccctcggtatgagatgcaggctgtatggttatcaatacagcgaaatcatccgttcgcttatgagcgtttatttttgtggcggctcatgcatcgaggatgtcaccactcatctgatgtaccacctttcgcttcatccgacacttcgcacatgcagtgccgacacgattcttagagccataaaggaactgacccaggataacatttcctacacatccgacactggcaagacctacgacttcaacacggcagacaagctgaatacactgctcctcaattgcctattgtccacagggcagctgaaagagggcgaggggtatgacgttgacttcgaccaccagttcatagaggctgagaagtttgatgcgaagcctacatacaagaagttccttggttatcgccctggcgtggcggttattggcaacttgattgtcggcattgagaacagcgacggcaacacaaatgtccgtttccaccagaaggacacgctgaagaggttctttgaaaggtttgaacaaaacaagcttattatcaaccgtttcagagctgattgcggctcgtgttctgaagagatagtggaagagattgctaaacactgcaagaccttctatatccgtgctaaccgatgcagttcgctctacaatgacatctttgccctcagaggttggaagaaagtggaattgggcggcattgagtttgagctggcctccattctcatcgagaaatggaaagggaaggcataccgtcttgtgattcaaagacagaagcggatagacggcgaactcgacctgtgggaaggagaatacacctaccgctgcatccttacaaatgactacgagtcttccgagaaagagattgtcgaattctataacctccgtggagggaaggaacgcatcttcgatgatatgaataacggattcggctggaacaggcttccaaaatcctttatgggagaaaacacggtgtttcttctgcttatggcactcatacgcaacttctataaattcatcatggcgaggcttgacgtgaagaggttcggactcaaagcaacaagccgcatcaagacgtttgtctttaagttcatctctgtgccagccaaatgggtcaggacatcaaggaagtatgtgctgaatatctattcatgcaacaatgcttatgccaatgtgttccagaatgactttggataacaccgacaacttatagtcgtgattttgcgtattgcctcaagtcgcatggtggggtaaggggcatttatatgtctttatggtgacattcgatgcactgtgccccctttttactaacgatgcagattcttttcgcttctgtatcatattaggcgcgtagttgcggatttgaggatagaagatactctctttcctataccgctacttttccggcaatatgcgggtgaggattgtaattgaccaattcaaagtcttcatacttgaaatcgaatatgttctttacatccggatttattttcatttgcggaagtgcccgcggctcacggctcagttggagtttcacttgttccaagtggttcagatagatatgtgcatctcccagggtatgtacaaaatccccggctttcaatcccgtaacttgggctaccatttgcaagagcaatgcgtacgatgcgatattgaaaggtactcccagaaaaatatccgcgctgcgttggtaaagttgcagactgagtcgtccgttggctacataaaactgaaagaatgcatggcaaggcggcagattcatgttgtccaaatcgccgacgttccaggcactcactatgatacggcgtgaatcggggttgtacttgattgtttccaccgcttcactgatttggtcgatggttccgcctttgtaatccggccacgaacgccattggtaaccgtagatatgccccaaatctccattctcatcggcccattcattccagatgcgtaccccgttctcttgcaggtattttacgtttgtatcgcctttcaggaaccagagtagttcgtggataatggatttcaaatgaagtttcttggtagtcagacaagggaagccctcgtccatattgaaacgcatctggtgtccgaatacgctgattgtaccggttccggtacggtcgcttttttctatgccttcagtcagtacacggttgagtaagtctaaatattgtttcatggagttacttattaaaagccttgccaaaggtaggcaaagttctcggtatattgaaaatttgcgctataagatttacaggaaaggagtcagcagatttcctacccagccgagaaactttttccagccggagcgctttttccacatctcgggcgtgagcaaggtactgttctttttgtccctctcgaacatgctgttcaactggttcgttgttgaagggtcgaagatgaaagcattggtctcataatcgtagcgcaagctgcggctgttgaggtttgcagtgcctaccgtacagaaagcgctgtctaccatcattactttggaatggtgaaatccgtccttgaacaagtaaattttggctccccgtttcatcaatttatgtgcgatataaaaagaggcttcgggcgtaaagggaatatccgatacagccggtatcataatctccacttccgtacctttctttaacgctttcttgatagccttacggatggatttcgtcggaacgaagtaggggtttactatctggatatttttttgagcagcttctatcgaaacggcataggcatggctgatagaccggggtgtttcccgcggggtgcggtctactattgcaatctcctcggctatactgtccggaaattggggcaggttggggaagtatgccggaccgccgatgtgttgtccggtttccctgttccacatagtcaggaagataccttgcaggtaacgtacggcatccccttctatgtgcatgtgtatgtcgtgccatttaccgattttaggcaagccgttgatgtaatagtcggcaatattcatcccgcccgtatagccgatttttccgtcgataaccactatcttccggtggtcgcggtgcatggcatggttgatatagggaaaggtgatggggtcgaacttgacgagttcgatgccgcgtgcctttatcgcctgcaaatgatgttttttcaacggctggttattggaccagttgccgaacgcatcgaacatggcacgtacctctacaccttcttttaccttttctgccagtaaatcgaaaagggcattggcgatggagtcgttacggaaattgaaatattccagatgaatgtggtgccgggcatggcggatagtttcgaataaatcaataaacttttcacgaccggtcatcaatagttcgactttattgttgtaagtcagcggtatttccatatcttgcatgtagttcattacaagagaatcgctggtactttgcgctcggacgcttccaataaaaaatgtaaataatatgatgaatgaaatctgtctcaaaactttataagtttatttagttttatgagttcgcaaatatacaatatatcattgagatatgttcatttgtttataaaaaaatcaacccttaccttttattaacaaggtaggggttgattgtattgttctgtaaggaagtttatttattctatgaggaaattaccgtttgcgatttccaaagcgtttaagccaatgaacatattttgcgatagagcaggaagagtaatactatgcctgcaaccaataaagatttgggatcaagttcggtgactccgctttgggcagcggcggtgagtgtttcacgaagtgtacccaatacctgttgcaatccgtcgaaaacaaagaacagcactaatgccagcgtgaaacagaacgtaacccatacttgtgaaatccgtcgggtgcggtcgggcaaatggcgcatcacacggcgggtgaagccattgtcgggtatttcctgccggttttcggcaaagaaatcaatcaggagtttatcattgttttccgtcataaccattttgttttaagtaggtagccattttttctttggcccgcgacaggtggctttttactgttcctgtcgggtagccggtaatgtctgcaatcttttctatactttggtcttccatataaaaaagagtgatacaggtccgttccgtttctttcagcatattcagcgcacggtaaatgtccatgtgccgccctatgtcgttttgctgcgtactgtattgagcgtctacccggagtgtttccagactgtcggtctccttacgggtgcgaagataatcataaaatacattataagcaatacggtagagccaggtggagaaactggacaggtttttgaatgaggagagattggtgtatgctttaatgaatgtatcttgcgccaggtcatcgctcaattcgctgtcgccacaagtcaggtgcagaaaaaaacgccgtacggacgactgatactttcctactaaccggtcgaaggccctggtgttgcgaaacaccacgacctgtgcgactaacgatatatcattgagctgactcatttttctgcattcttttccggaaagacggttcttgcattatcggatttatcattgcttttaggggctctgtcttgctgcgtatagtagatgacgagctgtccgaagcctgtgaacatgacaagcaggcctatgcagccaagtccgaattcttcggtaatggcccagaggaatatgaacagcccgataccgacgaacacattcttgattcctttactgcggatatctgtcgaatcggcttctttaaacagattttccggcagcggttgtccgctggctaatgcttgttccaccaggcggtatttggccttccggtttttgtagcggaagaaaaagatgatgaatacgatgattaaaggaaagccgaaaacgaacacaatggctgtaatcgcaatgactgcgtctctcgtggcatgtccgatattccagccgaaatcgtaagcactgctatgatgcttgtaatcatcgtcactttctgagttactgtttgaactgttttcgtaagtcatgatgctaagggtgtccgtaacggcttttccgtcaatcacggtatccttcaattctatgactctttgtttgtttcccagactgtcattctccgtaacggtccggttctttccttgtgccaatgtgcaaagcattaaggcggttgtcagtgcgaagataatgcgtttcataatcatgctgttttttgtttttataggtttctttgtgtgttagacgtacccatttgcttggaaagttgcaaagagacgacattttttttagaaaagctattatcaaccgcaaaatatttatactacctttgcgtatttaaaaagtaaaacctatggaactacccgtttcttttgcagactatacccgcactcttttgggagatgaggattataaggaattagtgacttctctggaatcggagcaatccgtcagcatccggttgaatccgctgaaaccttttgctttccgctccggagaacatgccgttccctggtgtacttccggtttttacctggaagaacgcccgacatttacttttgatcccttgttccatgcgggctgttattatgtacaggaagcttcgtccatgtttgttgaacaggctctgaagcagtatatgggtgaggaaccggtagtgatgctcgacctttgcgccgctccgggcggtaagtcgacgcatatccgaagcctccttcccgacaatagtctgctgatagccaatgaggttatccgcaaccgctctcagatacttgccgagaatctgaccaagtgggggcatcccgatgtggtggttaccaatagcgatccgtcggactttacaccgctggaagatttcttcgacgtgatattgacggacgtgccctgctccggtgagggtatgttccgcaaagaccctgttgccataagcgagtggaacccggagaatgtggaaatctgccggcagcggcagcggagaattattgcggatatctggccttgtctgaaaccgggcggcatactgatatatagcacttgtacttataacacaaaggaaaacgaagaaaacatccgttggataagggatgaattcggtgcagaggtgcttccgctcgatgttgcggaagagtggaatataacgggtaatttgttgcagggagaatcctttcctgtttatcgtttcctgcctcataagacgcagggagaaggcttctttctggcagttctccggaagccgggcatgagcgtccgaaactccggggataagcaactcatttccctggcaattgctcctgaaactccagggctcagagtagaaaagtccagggaaaaaggacgtaaagtccagggaaaagggaagcaaactccgggactttccaaggagcagcttgcgatattgcagaagtggatttttactgcggataagtatgagtttatccagaaaggcggcaatgtcagcgctttcccaaaatgttatcttccggaactgtctgcattgcagtcgtccttacgtattgtacaggctggattggagattgccggacagaaaggcaaggattggattccctgtcatgccttggctgtgagcgggatattggtatcggatgctttcccttgtgaagaaatatcgtatgaacaggccattgcctatttacgcaaagaggctgtcaccctttcggatgcagcccctcgcggagttgttttgctgacatataagcatgtgcctctcggctttgtcaagaatataggtaaccgtgccaataatctttatccgcaggagtggcgtatccgtagcggctatttgccggagacggtggtgaaagtgcattcttgacttgattccaccttcatcacagttcgttcttatatatccgcgccattgctttctggtattggttttccagttgcaggagatttgttttgctttggtaaacgaccgaaacttcgacgaaatactctatcatactgatttgtccgcctacaagagcctgtttcagtaaagtcaggtcctgctgttcctgaaaggtccgtttgtattcctgcatggaagcgtccaggttacgggcttcttcgtagagctgccataactcggagcttgcttttactcttgcattatctttctggaagtcgatgttcatggcttgggctttggctatcttcacttttcctttatttgagaacagcgggaaagagaagcctacgacaacaccgttcagcggatgtcccgattcggtattgcgacgatagcccaactccagtttcggcagccacccttgcttgcttgctgagatgaacttgcgggctgcggcgctttcgctgtcgaatgattgcagagagggatcggcggcaagcagttcgctgcatacccgatggaaatcggttggcaacggaaccaggggatagtccgtcagtccgagggctttggcggtaggtacggtggggccgtcggggaagggacgtccgggagtaagcggctggttgctgttcagtaccagcagttccttgattttattgttcagggcagtactgttcatgcgcgattcggtacgtacgttcaacagttccagattgattttatttgtttccagggcattggcatctcccgtagccagccgtttggcatacatggcggccagctcctctgcattcttcagccgtgcatcgagcaactcctgctggtgttgcagcatgatgatgtccaggcacacttctttggcttgcagcaatatctgctggcgcatggttgccgcctgtgcatccagtgctccggttttgagacggttcatctttcctcttgttatgtataaggtgggaaagtcgaagctttgggaaaccaccatttcccctacggttttgccgctgtttttagagtcccagagatgggcatatgagagggtgggatccggcaggttgttttcggtcctgctctccagcttctgtgatgagataagttgtgcattggcttgcaactccttgttgttggcttctatctggcgaagcacggagtcaatgccggtttcctgcgccctcatccccatgcaggcgaggatggtggcggtgaatataaatagttgcttcatatcttctgttattaaattatttattgatcgttataacgggatggctgtccggagccattacggatgcatctcttctttctttccgtgcatcatcaggtaaacaatcggaatgatgaaaccgttcaggaaagtggaagtcagcaatccgcccagaataacttttgccatgggactttgtatttcattgccgggcaggtcgccgctgagtgccaacggaatcaatgcaagcgcactggacagtgccgtcatcaggataggattcaaacggtccagcgaaccgcgtatcacgctgtcgtacacaccgtatccctcttcctgctgcaagtggttgtaatgactgatgagcagcataccgtttcgggtggcgataccgaagagcgagataaagccgatgatagccggaatactgacttcgcccgttgtgacgagcagggcgaatacaccgccaatcagtgccaaaggcaggttgataaggataatcgcactttcctttacgctacggaactcatggtacagcagcaggaatatcactacgatagacatgaatgaagtcaaagccagcgtgcggcttgcagcctgttcgctttcaaactggccgccgtattcgatgtgatagccttccggcagttttatcgaggcgtccacacgctcttgtatgtcgtttaccacgctgcgcaggtcgcggtcggcaacgttggcggagattacgattttccgtttcacgttctcgcggctgatagtgttaggtcccattgccgagcgtacttccgctacatagttcaacggtatcttttgtccgttgccggtatcgagcatcaggttacgtatcttttccatctcatcccgcaaatcatcctttacgcgtacggtgaggtcgaaactttttcctttttcatatacctgggatacggtttcgccggcaaggcatacgttgacaaactccgaaaactccggtaaggagatgccgtatttggcaagcacttcccgtttgggagcgatgataagctgcggacgttcaatctgttgctccacgttcaggtcggcaatgccgggaatgtcctgaatggtattctttatctcattgcccaaagcgaacatgcggttcaaatcgtcgccgaacagcttaatggctatattggctttcgtacccgacagcatggcatcgatacggtggctgataggctggccgatttccacattggcgcctacaatcgtacccagcttttcacgtacatcggccaccagctcgctgcgcgaacggtctttcagctcgaacggagcttcgatttccgatacgttcacgcctaaggcatgttcatccagttcggcacgtcccgtcttgcgggctacggtttgtatttcggggatggaaagcagtagttcttcggcacgatgtcccatcttgtcgctctcttccagtgaaatgcccggcagggatgatatgttgattgtgaacgaaccttcgttgaacggcggcaggaacgagcgtcccaatgtgaagaagcaggcaagcgccactgcaaacagaccgatggttccgcccaatacgctcttcttatgacccagcacaaaagcaagcgctgcaccgtaccactctttcatcttgcgtgctacgggcgaatcgccggtggaatgcttttcgtcttttatcttttctttgcccagcaggtaggagcacaatacaggtgtcaccgtcagtgccacaaccgtagaagctgccaatgccacgatgaaggcaatgcccaaaggtacaagcatacggccttccatgccgctcaggaaaaacagaggaacgaagcttaccacgatgatgagcgtggagttcaggataggcatacgcacttctttggaagcgttgaatacgacttccagtatcggcaggcgttccgcttccggtttcatccggttttcccgcaagcgtttgtacacgttctccacatcgacaatggcatcgtccaccagcgaaccgatggcgatagccataccgccgaggctcattgtgttgatggtgaatcccatatagtgcaacgccagcagcgaagctatcagcgataaggggagcgtcaccagcgagattacggtagtccgtacgttggcaaggaacagaaacagtacgataacaacgaatataccgccttcaaacagtgatttctgtacgttgccgatggaactttctataaagcggctttgcctgaaaatatcggtgctgacttttacatcgggcggcaggttcttctgtaagtccttgagggatgtttccagtttgtcggtcagttcaagcgtgcttgtggcgggttgcttggttacggtcagcagtacggcgggcttgccgcgttcggaagccgtacccagcttcggcagtttggctccgatacgtacatcggcaatgtcttccagcaaaatgggggaagcggaatacggagcattggacgttgcgggctggacactgccgtcctgcaatttgacaacagcctttgccagttgctccacccggtcggtggagatgacaccgcgcacgatgtattcgtttccgtattcataaagcactccgccgttggcgttcagattcatttcacgcgtaacgttcatcacttcggtaagggttacgccataatgccgcatccgttccgggtcgagttgaatctgatactctttgatgtcgccgccaagtacggcaacttgcgccacgccgccggtagaaagaaggcgcggacggatagtccagtcggctatggtgcgcaggtcgagcatggaagtcgagtcggcggtaagtcctacaatcagcatctcgcctaagatagacgattgcgggccaagcgtaggcttgcctacattggagggaagggactcgctgacaaccgccagtttctcgcttacaatctggcgtgccaggtagacatccgtttcccagtcgaactcaacccatacaacggaaaacccgttggtggaagaggaacgtacccgtcgtactcccgtagcaccgtttacagccgtttcaacaggaaaagtaaccaactgttccacttcctcggctgccataccgttggcttcggtcatgataaccacggttggcgcattcaggtcgggaaacacatccacttccgtgtgcattgcggtatacgtaccgcctatcagcagcagtaccgatgccaccagcaccagtatgcggttctgaagagagaaatgtattatcttgtttaacatgactgtactgtttagtgttcgtggctatgtgccggaattgcattggtagcgcctgcaagtttcacctgataagcgccttgagtcaccactttgtcgcctgccttgactccggaaaggatttgtacccgttcgccgttatcggctccaagagtgaccagttgtttcttgtatccttcctcatccacttgcaggtatacgaagaagctgccttgttcctcggtcagagccgtatgggggagcgaaataacattctccataggcgaggagagcaggaatatctcgacaaatgagccgggaatgatatcccctttgttgtcgaattcaaaagtgatgggcacataataaccgttgtcgcccgatgcctttccgtaagagagcaggcggccgttcaggtctttcagagcatataccttattgttgtagggagtgcagaagttggcggaaccgatggtgcggagatacggatagtatttttccgaaacatcggcgcgcaggaacagtctgcggttttgagtgatgcttacgagcggctgtcccacggttacataatcgccttcctttaccaacaggtttttcacgtatccgctgatgggagaggttactgcctgcccttgggccgaatggttcttggcaacggcttcatagctgatacgggcattctcatacgtctgtcgggcttgagcaaagtctttctccgaaacgattttattggggagaagttctttcatccgttcatactcttttcgggctgtttcgtaagcgatgcgcgctctttgtacggggtcgccgtccgccatattcttggacgacagcacaacgaggggagtatctttgccgacactcatgccctctatgacttttccgtgaaaagaaacgacacctgccacggtagctacggcaacgctttcgtcgccttgtgcggccataacctgcccgctggttttaatcacctgattgaaaacgtccggttcgatggtgcttacggctactccggcagcctgcgctttggccgggggcaatatgatttcgtcgctatgtgcggcaacggcttcctcaccgtggtggtgtccgtcgtcatggtggtgtccgggaccttcgttttcatggtcgtgcccttcgtggtcatgtcccgcatgggcgtgttcttccgtttcgtgattgtgtccttcaccggacttgctgttgcaggagcctaacaggaataatcctatgactcccatgaatagaattttcttcatgataattgtttttgtccttacttgtttggaaatgcaaaattagagaatggtcggtgcaaccgggttgcatacattcctgtgccggcaggataaccgtttccggcaactatcggtcaagcaaggacggaagggggcgcacgaagccctgtggcacgtgtgatgaacgtgccgtgaagagattccaggtagacaaactcttgcctgatacccgtttcctcgggcagagccaggagtttgagaagcggttcggtaaataatgtgttcacccacacgaaacacggatgtaggttactgttgtccgagttgggtgtctgttggaagaaatgggtggtcatacatccggtgtcgcagcagcaatgttcgctgcaagggccctgatgctggcagcacccgtcggacggcaggtcgtttttcatgcagattatgccgtcttcgtggtgatgatggggaatgacaggtactatcagcataatcatgctgatgaagaacagaaagtatgcaatgtaccttttcgttttcatccctctctctttgattggtcgcaaagatagaagttaatcacttaactgccaaacccaagatgctaaaaagccttgaataaatcatttaatccttcgctcatactgggatgcgtaaagatgaaatcccgcagaatgctgtaatgcaaatcattcttcatggcaagcgatactaaattaatgacttcgggcgcatcgatacaaaacagggtgcagcctattatgcgtcccgtatgtgcgttgacaatggctttcatcataccgtctatctgctgcaaggtacgggcacgcggtatggcggcagccggcaaccgggacacttgaagcgaataaccgcgttttacggcttcctcttcggtcatgccgatatgcgccaacggcggatctgtaaaaatgacatatggaaccggaatcctgtcatcggtttttcgctttttattgccgaacaaccggttggtgataatgcggaaatcatccagggataaatagtcatacaaggctccgcctcttacgtctcccatagcccatatatgcggggcggtggtctgaagatgttcattgacgatgagagctccccgggtgtcggtccgtatgccggctgcgtgcaggttgaggccgtcggtcatcggtctgcgtccggtggcaagcagcaatgcgtctccttcccaaaaatagggggtattgtcggaattgtccgtataggtcaatgttatgccatcggcagtgtcgtatacggacagggcataggcgttcaaacgtatctcgatgcctttccttttcagagattctagcatggattccgcaatgtcccggtcggctttgggcataaagcggctgcccgtttccaataacgtgactttgcttccaaaccccgcatacatggtggcaaactccattccgatagcgccggcgccgagaatgagcaggtgcccgggaagtttgctctgttggagtagcgtttcgctggtgaatacatgcttgcttgcgtcgattcctttcacggcgggcaggataggggtagctcccgtattgataaaaacttcctttcctttaaggagaatttcctttttattgtgcgagacgacctttaccgtatcgtcagatacaaaagatgccgtaccgtcatacaacgtaatattggggtgctccttgatacgctcgtgattcttgtcccgcaagaatgatacgagcttgtttttccgccttatggcgagtgcataatatttggcctgattgccgtagtcgtcccggtagagccgttcggcctgttccgattcgtaaatcagcgctttggtgggtatacaccctacattcacacatgttcccccgtacatctgcggagaacgttcgatgattgccactttccagttgcggttggcgagttcggcagccagcagttttccgcctttgccgaaccctatgatgatagcgtcatattgtttcatttcattcgtaattaggaatttgtggcaatgaaacaataggaactgtttgtttgttgcgggaagtaagttaatgaaagtttaccgttccagttcgcgaagcgaatccattttcttcttttcgaggaattcatagatgccgctcaggtgctcagtcacccgcttgttgccgaactcgtacactttgctcaccagtccgtccaggaagtcacggtcgtggctcacaagtatcagtgtaccgtcgaagtccatgagtgcctgtttcagaatatctttggtcttcatgtccaggtggttggtaggctcgtccagaattagcaggtttacgggttccagcagcagcttaatcatggcaaggcgtgtgcgctcgccaccggacagcactttcactttcttcatggactcttccggtccgccgaacatgaaagctcccagcaggtcgcgaatcttgttgcggatttctcctttggctacgtcgtcgatggtttggaatacggtcaggttctcatccagcaaggatgcctggttttgggcgaaatagcctatttgtacattgtgtccaatggtaagcgttccttcgtgttctatttctcccataatacattttaccaatgtggacttaccttcgccgttcttgcctacgaaagccactttgtcgcctctctctatagtgaggttggcattcttgaacacgacatggtcgccgtatgtctttcctacgttctccataatcaccggataattgccggagcgcggcgagggcgggaatttcagccgcaatgccgaagtatcttcttcgtccacttccagaagcaccagcttttccagcatcttgacgcggctctgcacttgcagggttttggaataggttcccttgaagcgctcgatgaattctttggtttcggcgatgaacttctgttggtcgtcgtatgccttttgttgctgttcgcgccgctctttgcggagctccaggtatttggagtagtttactttatagtcgtagattcgtcccatggtcacttcaatggtacgggtcgtgatgttgtctacaaatttgcggtcgtggctgatgacgatgacggctttcccgttgttgataagaaactcttccagccattggatggactcgatgtcgaggtggttggtaggctcgtccagcagcagtacgtcaggtttttgcagcagcagtttggcaagctcgatgcgcatgcgccagccaccgctgaaatcgcttgtctggcggttgaagtcctctctggtgaatccgaggccgagcaatgccttttcaacgtcctcttcgtaattggtggcgtcgatggcataaaacttctcgcttagggcagacacctgttcgataagctccatgtaactgtcgctttcgtagtcggtacgggtctccagttccttgttcatgcggtctatctcggcttccatctcgtgcaggtgggcaaaggcctgtgccgtttcctgaaagacggtacgtccgtcttccgtcatcagatgctggggcagataggcgatgacacaatctttcggtgcggagattttgccgcgggtgggctgccgcactccggcgagtattttaagtaatgtactttttccggctccgttctttcccatgagggcgatacggtctttttcgttgattacgaaggatatgtcactgaataaggttgtgccgccgaattctacggcgagtccgtcaatagaaatcattatgtcgtttttaaaaataaggtgcaaagataatgcaaatatattattttttatacctttgtctcggacaaacaataatacaggttatggaaatcgataatcaatcggtagattaccgtccgctcatccttgttgcggaagacgatgatagtaactttaagttgataaaggctattatagggagaaagtgtgagataatgtgggcgaagaacggtgaggagattgtctctttgtttcgtgaataccgtgacagggcggatgcaatactgatggatattaagatgcctgtaatgaatggtttggaagctacacaaattatacgccgggaaggcggaacattgcctgttatcatgcaaacggcctatgctttctctaccgaccgtgaaaatgccataaagagcggtgcttcggaagtattggtaaagcccattacattgagcaccttgcgcaactgcttgagcagttaccttccccgactggaatggtaggctttccgcaatgaaaagataactgtatcttagggcttgtttatattttgattaaagagttatatagcttgctatactcctcataaagacagaaaaacatcctcacaaagaattctctaaagaatgctgaacaaaaattaagcaggttctgaacaaaatttctattcttttgttaatgaagtctaaccaaaatttaacggaatgaatagtaaactgcgctttttgttaatatcactgtttatattcttcgtggcagcattacaggcttcagcagacggtgatatccgtgtatcgggcgttgtgatgtcggaaggagaacctttgccgggagcatcggtattggtgaaaggtactcacaacggaacggtaactgacgttgacgggaaatatacccttaccgtaccggcggacggtacgctggtctttagctttatcggactgaaaactacagaacagaaagtcaatggacgcacagttgtcaatgcggaattgcttccggacagcgaacaactggatgaggtgatggtggtggcttatgccactgccaagaagtatagttttacgggagcggcttccacggtaaaggggagcgagattgccaagatgcaggtgtccaatgtgtcgcgtgcgctcgaaggtacggtttccggacttcaggcaagtgctcccagcggccagccgggtacggatgctgaaatacgtattcgcggtatcggctctatcaatgcgtcgagcgccccgctttatgtggtggacggcgtccctttcgacggtagcatcaactccattaatccggaagatatagcttcgctgacggtactgaaagatgccgcttcggctgctctctacggttcgcggggagccaacggtgtcattatcataaccaccaagcagggacataccgactcgaaaaccacggtcagcatcaatgccagcttcggcggttccaaccgggccatccgcgattacgaccgtgttggaaccaatcagtacttcgaactctattgggaagctttgcgcaaccaatatgctctgaattcggataaatatactccgcagaccgcagctgcccaagcctcgaaagacctggtaggcaagctgatgggcggcggccctaatccctacggacccaactatccgcaacctgtaggtacggacggcaaactgcttgccggcgctactccgctttggaatgtggactggcagaaggaaatggaacaacaggcattgcgtacggaagtcggattgaatgtttccggtggcggaaagaccaaccagtactatttctcggccggctatctgaacgacaagggtattgcccttgagtccggctaccaacgcttcaacttgcgttccaacatttcgagcgagataacccgttggttgcgcggcggtgtgaatatgagctatgcccactccatacagaactatccggtttcgtccgatgccaaaacgagcaatgtcattaacgccggacgtctaatgcccgatttttatcctgtgtatgagatgaatgccgacggcacatacaaactcgactcggaaggaaagcggatttacgacttcggttcctaccggccgtcgggcgctacagccaactggaacctgcctgcaaccttacccaatgataaatccgagcgtatgcgggacgagttctccggacgtactttccttgaggtcactttccttgaagggttgaaattcaagaccagcttcaacttcgacctgatagactacaatacgctggattataccaatcccaaaattggtcctgccgtcaatacgggcggtggagcaagccgcgaatatacccgtaccttctcctggacatggaataatatcgtgacctacgataagactttcggcgagcaccacttcaatatccttgccggacaagaggcttactcttaccgttacgatgtgttgcaggcggcacgaagcaacatggctgtgcccgatatgccggaactggctgtcggttcgcttgtaaccgcaggcacgggctatcgcatcgattattcactgttaggctatcttatcaatgcccaatatgactaccggagcaagtatttcttctccgcttcctaccgccgcgacggttcctcgcgtttcgcaccgggtacacgctggggcaatttctggtcgttgggagcttcgtggcgcatagaccgcgaagcgttcatgcagaataccgccgactggctttcagccctgaccttaaaggccagttatggcgcgcagggcaatgacaacctgggtacgtattatgccagcagcggactgtattctatcgtttcacaggcaggtgagaatgctttggtgtccgaccgtcttgcaacgcccgatttgaaatgggagactaacctcaacctcaatgtaggtattgacttttcattgttcgataaccgtttctccggttcgttcgatttcttccagcgccgttccaaagacctgctgtattcccgtccgttggcaacttccctgggttatacttctatggacgagaatataggtgctttaaagaatacgggttttgagatagacctcaagggaacgcttatacacacccgtgactttatgtggcgtatgggtgttaaccttacgcactacaagaacgtggtgaccgaccttccgctgaaagacatgcccgttaccggagttacccgcctgaaggaagggcgttcggtctatgacttctatctgcgcgaatgggtaggggtagacccggacaacggcgacccgctgtggtataagaacgtgaaggatgagcagggcaatatcaccggacgcaccaccaccaatgactatgctcaggctgattattactatgtggacaaatcttcgctccctaaggtgtatggcgggttcaacactgctttctcatacaagggttttgagttatccgccatctttgcctacagcataggcggttatatcgtagaccgtgacgttacgatgctgtggagcaacggaagcaatccgggacgtgcctggtctaccgagatactgaaacgctggacgccggaaaaccgctacacggacgtgccggccctgaaaacagtgtccaataactggaactccaactccacccgcaatctgttcaacaattcgtatctgcggatgaagaacatcacgttgtcctacaacttcccgcagccgttgataaagaaaatcagcctgaacagcctgcaactttttgtacaggcggacaacctgctgactttctccaagaatcagggactggacccggagcagggcatcacaggactgacctattaccgttatcctgccatgcgttccatttcgggcgggcttaatgtttcattctaaatcactgttaacaatgaatactttccttaaaaatacagcaatcctcgcagtgggattattatcagtcttgtcctcgtgcagcggagactttctcgacaacaaacctacggacgccgtagattcgggtatcgtccccgtaccttccaatgccggacgtatcttcaacggtgcatggtataacttgtttgagtacagcagtacgtatgccaatatcggctatcgtgccctgatgttgcaggacgacatgatggcggacgatgtggtgtcgcgtccgatgtatggtttcaattcatcctaccagtttaacgatgtggggatgccggccaacaaccgtaccgcatttgcctggtatctgatgtacaagactatcgacaattgcaataccgccatttccattaccgcgaccggtgatgataatacggccgatttccgccattcccaggggcaagcctacgctttgcgggctttctgttacctgcatctggctcagcactaccagtttacttacctgaaagacccttccgcaccggctgttcctctttatacggaacctaccgcctctacgacagagcccaaagggaaggctaccctggaagagatatatacgcagatattcaaagacctgaataaggctaaggagcttcttgaagggtatgtccgtccggacgacaaatccaagttcaagccggatgtaagcgttgtcaacggattgctggcacgtgcctatttgcttaccggacaatggaatgaagccgccggggctgcacttgaggcggctgaaggatatactttgatgacggatgccaaaacgtatatgggctttaacgacatatccaatactgagtggatgtgggggcatccccaatctgtgagtcagtccgacgccagttataatttctattatattgatgtggtgactcccgatgcgtataacagttttatggccgacccgcattttaaggacattttcgaaacgggggatatccgtttggagttgttccagtggatgcgcgaaggctatttgggttatcgcaagttccgcatccgtgccgaccagaccggtgatatcgtcgtgatgcgttccgccgagatgtatctgatagctgcggaagcactggctcgtgaaggacggttggaggaagccgtgaatccgttgaacacattgcgtaatgcccgcggacttgccgattatgacctggcaggcaagacgcaggaacggcttgtcgatgatattctgctggaacgtcgccgcgaattgtggggtgagggattcggcataaccgatattcttcgtacgcaacgttcggtagaacgcatgccgttgacgaaagaggaagcggagaaaacgtacgattgctggcagcagggagatacttatagggaatataaccccgaaggtcattggtttacttcctttcccgacggaacgaagtttgtgccgaacagtgtgtattatttgtatgccattccggaaaaggagacgaatgcgaatcctaatctataggagaggtgtgttgggaagtgattgatgttttttaggcacggattacgcggattacacggatttattttattctttttccgtgtaatccgcgtaatccgtgcctaaaaatagtactctgaatagtgcgtaaccggcatatcttcaaatttgttactccgtcttcttactttctctttcctgcattttgcgttttacgaactcaatcttcaggttggcctcttccatattcttcttgatttccgtgatggaagacagcagttgcgccagttcatagacagctgccaccgccttgcggtcgttcggtgtcatgacagtggcataggaacgttcgccaagatagtgtacgcggatattcttgtctttgttcagattgaggaaagcgattacattaccgtcttcgcccagcttatagtccgctttctctatcttctcgtccaaatcggtcgtttcatagctgtctttggaagccggggtttcggcaaaactgccgtcgggtgcagtgactttcactgcgaggtgatggatgttatgcgggccgcaatagatggaagtcatgctcatcgctccggtttcatctacctgaaagcgcaggtaagagcggtgcaggttcttttctattacttgtgagggatgcaggtaattgccgattttttgatattcggcatctttctcgaaagtataattcttcttgatggcatccacctctttttgtttttcctgaagcatactgtcgaggtagaccagcgttttctcctgttctttcagttccacctgctgcatcagtccgataccctcgcggcgtgtttcaaaggccttcggatagagtatcttgatgctgtcaatctgaatcttcgcttcgctgtaatctccgcgttcaaacgcttcgcgggctgcctggagtttctctcctgcttttttctctacattgctgcaagagaagagcgtgcagcagaggcacgcaaggaatgctgctttcttcataattttcattcttgatgttagtgggggcaaaaataaaaaataatatccgtatctttgcaccctcaaaatgatttattgacaaatgattgaattgacgacagaagaactgaagcagcgtttcagtgacagcatatttaagcggatttccgaaacagcggatgaattgggactggagtgctacgtagtcggcggctacgtgcgcgacatattcctgcagcgtccttccaaagacatcgatgtggtagtagtgggcagcggcattgcaatggccgaggcgcttgccaggcgtttggggcgcggcgcgcatctttctgttttcaagaatttcgggacggcgcagttgaagtatcacggcacggaagtggagtttgtgggtgcacgtaaagaatcctacacgcacgattcgcgcaaaccgattgttgaggacggctcgctggaagacgaccagaaccgccgggattttactatcaatgccttggcggtctgcctgaacagtcagcgttacggcgagttggtagaccccttcggcggcatggcggatatgaaggagaagaccatccgcacgccgcttgacccggacataaccttcagcgacgaccctctgcgcatgatgcgttgtatccgctttgccacccaactgaatttctatatcgacgatgatactttcgagtccttatgccgcaacaaagagcgcatctccatcatatccaaagagcgcattgcagacgagctgaacaagattctgctctctcccgtcccgtccaaaggatttatagacttggaccgttcgggcctgttgcagctcatcttcccggaactggttgccttgcaaggcgttgaaacccgtaatggcagggcgcataaggacaacttctaccatacgctcgaagtgctcgataatatcagcaaaaagaccgataacctctggctgcgctgggcagcccttctgcacgatatagccaaaccggcgaccaaacgctgggaacctcgtgccggatggacattccacaaccataacttcatcggcgagaagatgatacccgatatcttccggagaatgaagcttcccatgaatgagaagatgaaatacgtgcagaagctggtagggctgcacatgcgtcccatagtgatagcggatgatgtggtgaccgactcggccgtacgccgcctgctgtttgaggctggcgatgatatagacgacctcatgaccttgtgtgaggccgatatcacttccaagaatatggagcgcaagcagcgctttctgaacaatttccaactggtgcgtcagaaactgaaggacttggaagagcgcgaccgtatccgtaacttccagcctcctgtcagcggtgaggagattatgaaaacattcaatcttcccccctgccagcaagtgggtgcattgaagagtgctatcaaggatgccatattggacggcgtcattcccaatgagtatgaagctgcccgcgcgtttatgctgcaacgggcggaaaaaatggggctgaaataggctccggcactctatggaagaaaacagggagtgtgtcaaaattcaattttgaggagataaacttttaacttgaaatttgcacattctgaaagaatcagaaaagggtcgtatcataactctcaaagtggagtttgatacgacccttttaaaggttataattacaatctgtaacttttcagaggctcattttagttgtgacaacctcttagcaaaatgtatatcgcttgattttcggttgataaaggaatgtccttactcttccgcctggaattttcggctcaccttcatcaggttgatggagtaggtcacaatattctgtgcttcctgtatcatcgtcagatacaccatgcttaccttaatgctgccggactggctttgaatgcgctgtaactcttcgcgtttcaggtgggcgagctggccgttcaggtcgttggctttgtgtatatcttcctcgaagttattgtagttgttgttctccagcttgtggcggcacacctgcagcaggtaaacgatgtcttccgttacatcggcaaactcacctttctggatggtgtcgagcggtttgaagttattgtcgatatgctccaggcacggttcgcaaagacgtcccacactatataccagttcgctggcaaagtcattgccctggtagtagtaaagtcctttttcgagcaccgtattgttgtccaggcggcacatggcaagcgtaccggtacgtttcatctgtttaatcagttgtttctcgaacttcacggaacccattgcccggcgcagtccgcgcaggttttcgtgaaggaaagcggtaacggtgcgttcgaagttatcttccgtaaattccagtattttgcccaattcctcacgggtgtgcttgcgcagcaattccagaatctccatgttgtccgtgctctgcatcagttgcttgatggtagcgtttcctttttccttctctttgcgcttcttgtacattacctggctgcgtatcagcatgaatactgccagaccgataagggcgatgatagcgattgtaccgccgaaataaattacgaaggtaacgaagaagcagatggtaaatgccgctccggcagtgatgaaccagccgccgataacgctcagtacgccggtgatacggaacacggcggagtcgcgtccccaggcgcggtcggcaagggaagtacccatagccaccatgaaagtaacgtaagtggtggagagcgggagtttcagtgaagtacccagggcaatgagcaggccggcaagtaccagattgatggaggcacgtaccaagtcgaacgccgcaccgtcggcaatgatggcttcgtccttttggaaacgggtctcaatccagcgtttgccgctttcgggcatcactttggaaagtccgttggctatcgtcatactgaaacgtaccagtgtacgtgctatgggagtgctgccgaagctctcttcaccttcgtcctggcgagagaggtcgacggaagtcttgattacattgtgtgctttcttggatgtgcacagcgcatataccatgatggcgcccgcaccgataaggaagtaccacggcgttttggcagggccgagcagtgaggtcatcaggaagccgtcgggacctgcggcagtgccgttggtcgtatagtcgatgaaagaggagtaaccggcaaggggcacacctatgaagttcaccaagtcgttgccggcaaaggcgagggcgagggcgaaggtacccagaagcaccactatcttgaatacgtttaccttgcaccagtgcagcacctgcatcaatatggtgaagaacacgaagaagcagccgatgagcatagcagtgttctcctgtatccagtgcttgttttcgggagtcatgaaagaactgtccttcaaaccttttatcagcatgaagtagatgatggaagtagctgcgataccgccgaagataccgatgctgtacttcatctttttggtgtagttgaaggtgaagacgatacgtgccagccattgcaccagcataccgaagaagaaggcgatggctacggatacgaatatcgccatgataacggacaatgccttgtctgtgttgataagatcgcccagtccgagcgtatcgctgccgtacactttgatgagggcgagggcaaaggttccgcccagcagctcaaagaccatggatacggtggtggacgtcggcattcccatggtgttgaatacatccagcagtaccacgtctgtcagcattactgccaacaggatgcacatgatttccgcaaaataaaaatgctccggctggtagataccgtgacgggcaatgtccatcatgccgttggagagggcagcgccgatgaatacaccgatacctgctataaacagtatcgtcttgaaagatgctgctttggctccgacggcagattgtagaaagttaaccgcatcattactgacacccacgacgaggtcgaagaccgcgaggacgaacaggaagatgacaatgcataagtagatagtttccataacatgtattttatttccggttgcaaaggaacgtgtttcgtgttgcagggaaatgtcatatatgttacagaaatgttacaaacttctctctcaactttccactctcagttctccgcttttcaggtattcgtagaaagtatattgcgcccgtactttctccttttgcggacgggctgatttccagcggttacgcaggtggtcgtccacaaagcaggctttgcgcttgtccgagagctggatggaaagcatgtccgacagttcccgtttcaaatccgggtccagaattggggttacagcctctatgcggcgatacaggttccggcgcatccagtccggcgaaccgaggaaaagtttcggcttcccgccgttgccgaagtaccacacgcgggcatgttccagaaatgtatccacaatacgtgttacacggatgttacggctgtacttccgtccgggaatgaggcagcagataccccgtacaataaggtctatcctgactccggcctgcgaggcttcgtacaggcggtctatcatggcggggtcttgcagggcgttcattttgagtataatccttccttgttttccgcttttcgccagttctatttcatggtcgatgaggcggttcagttcgggaatcaggttgaagcgtgccaccagcaggcggtggaacacgggattttccttgccctgaaaagtgcggaacaggttgtgcaggtcgtttacgagtatggggttgcaggtgaacagaccggagtcggcatagagcgtggcggtcttttcgttgaagtttccggtgctgatgtaggcatagctgggcagtttgtggccttgtctgtcgcggcgcagcacaagggctactttggcatgtaccttcagtccgggcaggctgaacaggatattgataccggcggctttcatcatctcggcggtggcaaggttgttctcctcgtcaaaacgggctttcagctctacgaaaacggttactttcttaccgttctgtgcggcggctatcagggtgttgataactgcggagttttccgcaacgcggtattgggttaccatgatttcgcgcacggtgggttcgtgtacggcttcgtacaggaaatggatgaagtgctcgaaagagtggtacgggtagtgcaacagcaggtcttttttctccacataccggaagatggactcccgctcgtccaggcaggtcagcttcatgggctgaggcttgcggatggggcgcacggcattgttcggattgggcagatgccgcaggtcttccatattgaggtgtttgtcgcccggaaccagttcctggcggttgatgcggaaggcatctacaaggaagtccagaaaatcgtcgggcatggcgcggtcgtacacaaaacggcagacggctcctatcttgcgttttttcactttgcttttcacctgctctataatttcggatgtgttggcggactcgtctatcagtatgtccgcatcccgcgaaatcttgatgcagtagctgctgtccacatcgtagccggggaatatcgtgtcgatattggctttgatgatgtcctcgatgaacatcaggtagtagttcttcccgtgcttgggcagctcgatgaagcggggcactttgctgtagggcagcttcatcacgaagtattggggagttcttcctttgtttgcttgtccctctgtgcccttgtctcctttcggatacagtcgtatggcaaggtacaggcggttgtcgcgcaggaacgatattaccttgtccttgctgacaggtacgggagagagatacggaaagatttcttcccggaagaagctccgcaggaattctttatggaaaggctctacgttgcggctttggtagaagatgatgtgctgttgccgcagggcaggcagtattttctgttcgtagatgcggatacgctcttccagttggcggttcacctcttcgttgatttcggacaccagttgcatggcggactgcacactctcttcatcgctgtgtgcggcgccggtggcaatggccttatggtcggccacacgtattttgtagaactcttccaggttggacgagtatatggatataaagttgatgcgctcgtacagcggcagtgtatcgtcttccgcttccagcaatacccggtagttgaatgacaaccaactgatgtcgcgcttgaaatatctgctctccataaataagattaggtttattttccaaatatagctacctttgcacacataaacaaatgaaaaatgacaaaagttggtttactgtcggatacgcacgggtattgggatgagaagtatttgcagtacttcgagccgtgcgatgaaatatggcatgcaggtgacatcggtacgttggaagtggcacagaagctggcggctttccgtccgttccgtgcggtgtatggcaacatagacgggcaggatctgcgccggctctatccgcaggtgctccgctttacggtagacggcgccgaggtgctgatgaaacatatcggcggctatcccggcaaatacgatccgtccatacagggaagcattctggtgcatccgcccaagctgttcatcagcggtcattcgcatatattgaaggtgaagttcgacaagacattgggcatgcttcatataaaccctggcgcagcgggcatttacggctttcataaagtgcgtaccatggtgcgtttcgttgtggataacggcgtgttcaaagaccttgaagtcatagagcttgccggctgattttgactttattattttgtcatgtcagaactttttcagaactttgtgccctgaatagcaacgagagccgtggggcattgtcctccttcttattttattctacatttgaagtcaatccaataaagaactgaaatatgaaaggaattattcttgcaggtggcagcgccactcgtctctatccattgtcaaaggctatctccaagcagattatgccggtctacgacaaacccatgatttactaccccctttccacattgatgctggcgggaatacgtgaagtgctgattatctccactccgcgcgacctacccatgtttcgcgatttgttaggaacaggcgaggagcttggtatgtctttttcttataagatacaggaaaagcccaacggactggcacaggctttcgtgcttggagcggaatttctgaacggtgagccgggatgccttattctgggcgataatatgttctatggtcagggcttttccgccatgttgaagcgtgccgcttctatcgagaagggtgcatgtatcttcggttattatgtaaaagacccgcgtgcatacggcgtggtagagttcgatgccgacggcaaggccatttctctggaagagaaaccggcacagcccaagagcaattatgcggttcccggtttgtacttctacgattctactgtaacggaaaaggccgccgccttgaagccttctgcccgcggtgaatatgaaataaccgacctcaaccgtctttatctggaagaaggaacgctgaaagtggaactcttcggacgtggattcgcctggttggatacgggtaattgcgacagcctgctcgaagcaagcaatttcgttgctaccatacagaaccgtcaggggttccgtgtgagctgtattgaggagatagcatggcgcaaaggctggatagacgtagatcaactccatcgtctcggtgaacagctcggaaaaaccgaatacggcaaatatctgatggaacttgcagactcgtaccgctgacaagaaacatgtgacttctctatttcttaatttttaattctcaatttttaatttatgaagacttatcttgtaaccggtgctgccggttttatcggagctaattatataaagtatattctggcaaagcacgacgatataaaagttgtaatattggatgccctgacctatgcgggcaatttaggtactattgccaaggacatcgatgatgaacgttgcttcttcgtgaaaggcgacatttgcgaccgtatccttgccgatgaactgtttgccaaatataaattcgattatgtggtgaacttcgcagccgaaagccatgtagaccgcagtatcgagaatccgcaactgttccttatgaccaacattctgggtactcagaatctgctggatgccgcccgtcgtgcatgggtgacgggtaaggacgagtcaggctatcctacctggcgtaacggagtgcgctatcatcaggtatctacggacgaggtttacggttcgctgggagcggaaggcttcttcacggagaagaccccgctgtgtccgcatagcccgtacagcgcttccaagaccagtgccgatatggtggtgatggcctatcatgatacctacaaaatgcctgttaccatcacccgctgttccaataactacggcccgtatcacttcccggaaaaactgattccgctgattataaagaatatccttgaaggcaagaacctgccagtgtacggtgacggcagcaatgtacgcgactggctgtacgtggaagaccactgtaaggccatcgaccttgtagtgcgcaaaggcgtggaaggtgaggtttataacgtaggcggccataacgaaaagaccaatctggagattgtgaaactgactatcgctactatccgccgtctcatggaagaggagccgaaataccgtgcagtcctgaaaaagcaagtgaaagatgccgacggacagattgacatcagttggataaacgaagatctgataacgttcgtgaaggaccgcctcggtcatgaccagcgttatgccatcgaccccaccaagataacggatgccttaggctggtatcccgaaacaaaatttgaagtgggtatcgttaagaccatcgaatggtatctgaataatcaggactgggtggaagaagttaccagcggcgattatcagaagtactacgaaagaatgtacggaaagaaataaccgttacagaataaaggcaaggcttagcaacaagccgaagaacagcatattacgtgaggtttcacctaatatgctgtttagttttttaccgcttcgtatggctgccattctgtgccaggtcagcacatgcaggcagaggtagacgcagggagcccagataaaggcaagcggctctattttgccggtataaacaaaccataggctgagcaaggcggctgccacgcctaatcccagatataggtaacggccgaaaggttcgccgaaacggacaatcagcgtacgtttgccgctgagggcgtcctgttcccggtcgcggtagttgtttacgaccagcaaggtgtctattaccagaccgcagatgaacgaggctacccatacgtcggccgtaatggagtgggcttgtacgtaataagttccgcctacggggataaagccgaagaaaaccagtacgagcaagtcaccccagcctttgtaggagagtagggtggtgtataggaaagcgaatattacgcagagcaaccccagcagtatcagttcccaaccgccgtgaggcaattgtccccagcactgctgcaagagtgtgcaacctatgaggcaggaaaatatgagcatacctgctatccctcgtttcatggctgtgggagtaatccagccttgtgcgcaggcacgttcggggccgaggcggtctgcacggtcactgcctttcaggtaatcgtaaaggtcgttgatgaaattggcggcaatctgcatgccgcaggcaaacagggcacatagcagcgccggtatgatgttgaatgcttcatcggcaaatgccagagcagaacctgtcaatacgggaataacggctcccgtcagtgtcttgggacgggcggcaagtatccatgcgtggaacgagttggtagctattgctttcatgtcgtacttttagaaagttatactacaaagatagcgaaaggatttgttatctttgcactgctattcgggtaaaattattcattgcgtcaaacaataaagataaatctatggctcaggcactgttttatagagggttcgggagactgctgtttttttcttttccggtattgctgttcttttcatcgtgccggtctgcgcgtaattttacctcgcctcttcccggtgagtattctgtccggatatccggatttccggcatccggatataagaatgtgaagcgcatcaggcagtatgagtttgcacaccgtgatgttcctgccgcattcgacggttgcaggctggcttttgtctcggatttgcactaccgtagtttgctgaaagagaaagggctgaaggacatcacccgcctgttgaatgatttgcaggtcgatgccctgctgataggtggtgacctgcatgagggctgcgagtatgttccggctgtgattgcggcattgggagctgtgaaaacgcctttgggcacttatgccgttcttggaaacaatgattatgaggcttgttacgatgatattctaaaggaaatggaacgtcagggcattcgcttgctggagcataaagcggatactttgaagcggaatggtgagcggattgtgatagccggggtgcgcaatcctttcaatcttgaacggaacgggcagtcgcccacgctttccctctctcccgatgacttcgtcatattgctgacgcatactcccgattatgccgaagatgttcccataaccaatgccgaccttgtgcttgcaggacatacgcacggcgggcaggtaacgctgttcgggctgtatgctcctgtagttccttctcgttacgggcaacgtttcctgaaagggataaggactaattccgacaagcaacctgtcatcataacaaacggtatcggaacttccagtaagaatctgcggttgtttgcaccaagtgaggtggtagtcctgacactgagaaagttataagcgtatttatatttgtgccaagcttgtggcacaaccgtgcctattaaatggcacaactgtgccaccctaaaaacacaattatgctgtcagggtggaatggctggaggatgctcttgcgtcatcattctgatattacaaacagatgatggtgttgctgaaaacgtagaatggatatatcctgcgttttataagtaaggatttacttctacatcttgaggcttttcttctacggtgtcgtcaaccgaaattcccatgtcaattctgccgctggcgctggtttttatattcagtttataccattttgccgcttcaagctgaatggtttgcgttgctgtacgcacattgcctttatatgtaccggaaacggtgcatttcagattaggatttttactgtcgatgttaaaaaacgctgcatcgtatgtactgttgcatttgccgttactgtcgaaggtgatgatccgtgaaggttccgcctctgtagaaacctcaacggtataaccattgaatacctgtgcaaagacttcgtcataggcaatacttactttggcattggccatagtgcaggttactttgacgttgcttatctcattggtcctgacttcaaaaggggcgcttgttccgaagtaacgtatttgtcccactccgtcattagcggattgtccaacctcttccgtgcagctttcagccgtaactgtgtagccgcttcctatggggaagatgaaggtggtgttcttaaaggtcagaaagttggttgactctaatttcacattgccgttttggaggacttgtatgttgtagtccttcgcatccgtttccgtaaggtctgttaccgtgcgggtgcttacttcgatttcaggagcagtggagttttccagagtgagattaatctgtccgcattcttgtaccggttcatcattattggtgcaggctgctgcaatcagcgcaattcctgctaaagctaaaagtttcttcattgttataattggggtttaattattcgtaatcatagtttaagacaacattatctattttgagaacactacctacgacacggtcttctccaaagggagaactaccgtaaccaccgttttctctatgcatattggagatagtggtatcgtaaccggattgaaaaaagacagtaatatatttggccttgctttgcatatgctctttattatattcaaatttgagagtctgtgtggtatactcctcttgtccggatgagttgaattcaatggtacttgcaatttcttttttatccgcattatatactttggcataagccaggcacttgtcgttgatgacaggggaatatttgtagtcgaacgatatacttgtaggacggctttcatgctgtatgcctaatgtgtatgtatcggtgtttttatcgaatgtgcctgtgaaaaggtaacctgcatatgctgttccgttatcccgggtataagtatatacttcatctctgctccaagtgccactgacttttttgttgtagaatgccaatgttgaaatttctacagcatttgcgtctttgctgctgtctgctgttggaacagtaccggaacaccagcgccaccagactccataaccgactcctgttccccagcctgtggcactttccccacctttggtcgttctttcatttctcgtgttccaacctggaaggtaataacaatataatggacggctccaactgccgttacctccatttatctcttttttattccagactgattcaaaattgccattctccaattgttctgcactttccattgttacttgctgtgaattagtacagatgatgcttccaaagcgggaacggatggtatattggttgttggcaacgagcccctttataacagtctttccattatcatttatagcttgtatccagttaattccgtccgctgaagcttcgtacacgatattggccaacactttttccgtcatttccggtttggagctcatattcgttgccgtcataggagtaatatatataaatgtactccatacatctccttccatttgctccggtagtgtaaaagaaggcaaatcgggattgcaattcagtgtatagcgattagcgacaagcacgtcttttagttcccaagagttcgattttgcttcatttaaagtattcgtaccggataatgttaatgtataatccttgcctgccggtacaaaaaagtcagcgttattagggatttcttgtatgcttgtcccatcggaaatctcgattttgtaggtgtcgtagtgctcaagcaaattatcggctattgtaggatggacgattgcgcaggatagctttacggaaaggctctttgctgtttccgtggctgttgtaatccggaactcttctgttgcggcatataaataaggagcggttcccatgttttccgttccataagatgcttctaacctgtaaaagccttcatccaatactaaagacgtgaactctcctgtttggttgtacaccacttctccggtctgcgtatcggttactttgtatgtcagttcagatgccgttggtgcggtaaaagtgcttgtggcacgggtgacagtctctgctgaggcttctgccgaaatatccacatctttcagcacgagccgtcctttgcctttgtacgagggttgcaaaacgtcttcttggcagcttgtaaacccaagaaacaggcagagtatgaatatgtatcgcattgcgtttctcatatcttcttattcttttcaatagtcataatccaaactaaactcatctacgtgaagtgtgcttcctctgccccctacgaagtagtcgccatatttacttgccgagcatacgatgacaatgtaggttggtacacggttagtaacacggtagtccaggttcaattcgaactttttgtattccgttactgttgttccgctgtacatttcggcataggcgatgatatgctcgtcgtttttgtcaaacagctttctgttggtagggcgggtgcgtatctctatcggttccgtccaatcgcccaaagcgatgtatatggcacatgtatcgggctttcccttgtaattttggaaacgcgtatagtcctgactaccttcggctggcaggtctgtgacaggtgcggtggtatatttgtagtatcctttcaattttgtcgggcggcctgtaaatggctggccgaagttcaaaataccgtttgtaccgtccaccttgatgaattttcccgtaaacaggttgccggcagcaaatttcacgattacattcttcgattccagcctggctgctttgccgcttccggcagcggtgtcatcggtgggggtggaattgctctgactggctgtggtaacgcctatattgccggtatcccaaaatggcgtactattttcttcccaggggtttgccactttgccatccatgctccaataatcgaaagaagcattgggcagttctattgccgctgtagtggtgaaggtcttttccgtacttatggaagttcccgaatatgcacggcagacataggcggtcgatgctttcaggtgaggaatgcgggccgagaaactgccaccggtcgttatcatataggaagcatctactttctgccactcttcagaggttgcctcacgtatttcgaagccgttgtcttcgccttcaagcccctctccatacagccaggctacattgacccaaccgtctgccgatgttatcttgacagcatctgtttcgaacacattgagtgtccagtcttccagtatatcccggtaagtgacgattacgatttgcggttgtccgcctgtaaagttcattaccgtggcgttgccgtcgtatccgtgtatggtggagccggtaggtcctaactttagttctttgattttaattttggacaaatcctgctctttgcttacataggcaatggctcttctctctttttcgtttacatagaaaatggcctcaccgatttggccttctacaacaaaacggcggtcgatcggctgtttggctatgattttccacggataatcctggtagagggacagaataaccgtttgaggattggtcaggtcgaaagtcgtgtccggacgtaagatgcttcttgcaccttccgtcatttccactttcctgatatatactttcttcatatttacggtatcggcaagggtcactgtcactgtacggttctccgtactgataactgctcctgtagtttccccctctacttcgagcgcagtgatgtcgagctttataatgggatagggtacattgttctctatgcaggagctcagcagccctgccaatatcaggaacagtccggttgcatatgtttttattttcttcatgtatcttacaggcaaagtgtaattcctatatttatgttgaacaagtttattttgaagtcggcgccgctggcagtgcgtttgcctgtttcaccttcattgttcttctgtttttctattctgtacttgaagccgacaacaccgaatgacatctcggcgcatacattctccatgatgaatacggcaacaccgggattcaaacccagatgtatctcgtgtatggtggtttccgtgcgtttcaatgcttcgtccttgccacgggtgaaagtgctgctgccattgttgtaggaaagcgaactctcattgaagaatccgaagcgcttgcctctgtccagtcccacatacgaacggtggaacagtgcgatgctatacgagtcttccgaatagcgtatgtctttgaggtcgaaactcaaatcgtcgtcaatgtttagcgatatgttacccaggtcggctacggtgtggttatacccggctttgagtccgactatgacattgtccttgaatgcataacctacaaatggtctgacggatattgtacggaagttgcaatcaaagtcttttatcaatgagaacagcatccggctgtcttcgccgtcataattgatataggagaacgtaagtccgcctacccatttctttttgggtataaaacggtaattgataattccccggtcgaagcgtccgaccggtttggtatagataatttccgaactgtccggttgagtcgcttcaacagccggccgttcaatgtatatcgtgtcgtgtacataaactgtccgtacccgtaacgagtcgtgcgcttggaataacacttcctgcgtttcttgtgcccggactgtttccatacccaccatgatgcacaccatatatataagtaacttcttcatccttgattataaataaaaggccagtcccagacctatggaaaacaggtttatcttgaaattggcgctacttgacgaatgttcgccttgatacacctggttggttgtctgtttggttttactgaagttcaatccaagcacaccgatactgacttctactgcagtatagttgttgatgaatgccacaatgcccggtgctgctccgatgctcatgccggtggttgtggcgaaagttccggtgaccgactcgtcctttccgtttattactctggattggctgcccgaccattccagctgggtttcgttaaagagtgcaaaccgcttgcttttgcccaaactgatgtagttacgcagtatcagcatacctgaatatgtgtgtttcaactgatacaggtcgttgatgtcaaactgattgtcatcatcgatattcagcgtcaggccatctatctttatcaatgaacggctgtaggcaaaccggcctccggccgctatattgtctttaaacgcatagcataccaggggactgactttgaatgtatagccgtcggatttgaatccgtcgataatcaggaactggtagttatcctcggtatgttcggagtaagatatcgaactgcctgctatccattggcctttgggaacaaatgtgctttgttcgatttggcgtttgaattcttgcgcttggactttaccgcctgcgatagctgccagggctaatgttatgatgattgctttttgtatcacttcacagatgtttttattcataaactaattcgaagtcgtcgagccacatcgtacttcctgttccgccactgaaataatcgccgtacttactggatgaggctacgatgatgatagctgtcggcttccggttggtataacggtactctaccggaatgttgaattcaatcattccttctccttctgttgaagatgtgaagtccttttcaccataacctatgatatactcgctgttgacatcgaacagttgtgcgctgcccggagtcttatagttggttctgactattacaggccatgtctcaccgccgtatgtttcgccgggccagttgcccaatacgataaagatgcttcctatatccggatcgcctttgtcgataaattcgcaactgttgtcgtaattcacggtattggattggtagcggacatatccgcgcaatgccgtaggacgagattcgaacgggcgtccccaacccagtacaccattacctacgacaccatccatattggtagccaggtatttgccggaaaatacattgccggccgcaaactgcccgatgcctaacatgctggcgaatttggattccagtttggctgagcagctaccgccatgcttcacagaaccgtctgcggtggttatatccgttccggccttttgtgaaccgtggttgccggtatcccagaacatcgttccgccggattcgtatacataggtcggcttggaaccatgccacttctcaaacccggcattgggaagttgggcggctttctccgtagtgaatctgcaaaccacggaagatgccttttctccggcaaccgctacatattcataggtggtagccactttcagaccggtgatggcagctgtcatttctttaccgttcaacacagcttccacttccttccagtcggacgagccggttatccggtaacggaatatcaagggatcggatgtttctttcatcagaccgccccgcaagactgctctcgatgtccatatgtcaccttctgtaacctctttggtcagcaccactgcatcggaagcggatatggataatactccctcattggtgcggttgcggacatcggtagcatgtaatattatgttataagtcccttcttttgctgtgatatgtttcattaaaccgtctgaaaacgtcacacgcatcgtaccgacatcgctgccggtattgtattcggatttgtatgacaggccggaagcttccaaacgccccctttccatttccgtcagtctcatgaggttcatccggacgggaagtccacattgtacgaattgttcgcagtacatggacagttcattgagtacggatgtacttgttacggtatacgataattccgttcccatgcctacttcatagaatgcggaagaggttatatcgaagttttcgccgcggaagataggtcgttgataaatctgtacttcatcggttatttctcttatcggattggcgttgacactgacttttaccgtaccgccaccgtctgcgtagtctgtcggtatgaagttgaaggacaagtcgtagcgataggcggattgcgcatccggaatgtttcctttttttgtatagctttttccgttgggcatggttgcttccagatgccattgcagcttagtattgcccgccggcagcatgtagtagccgatggagtctttggtttcgggaagataatctaaagtgccgtctgcagtggataccgtaactttataggtttggaatacggagcccaatgcttcatcatattttacggcaactaccgtgttggcgatgccgcaagtcagctccaggttggtaacttcgccgctgttaatgtggaagggacgttcttctttataatatacagtttcgaaagaagcgggtactgagtcgcctgccgtaacaagggctgtgtagctgccggcagagaggtaaagcgcttccggaagttcgtttactcctttgtaccggcggacggttcccttttcattaaggatgccgattgtacagtggcgttgtaaagaatcctgtaattcatcggtcatagaacgggttgtaactttcacctggtcggttacacctactttcaaatgaagcattccctctccgttcaaggtgtccttttccgaacaggcgataaatgaaatcactgttatggctgtcagataatatttgaagtatctctttggcattgtgctttgcttaatttacgataagggctaatattgcggatgccgtgtttcctttgttatccgtaacctttagattgaatctgtgggttccgggaaagcccaccaataatcctgtaaatccactgatatcaaagtcaatatcggttttaccggtaactttatccccatagggtagacctaagttctggagtattccgattaacgctcccgggtttgccaagtcaaagtcggtgagtcccaaatcggaaatggcatttgcaaaatcggtactgctggaagttattcctatctctaaattccggataccttccggtaccgctatttttacaattacaggatagggattgtccgttgagacaccgggtggtatggttatgctctgggtaatatcgaaacctttgccggtgattgccggtttggttccgggactcggttcgggattcggttcgggttcgggtagcggctcttcttctcccggggctatggttatgtctttctctacaacctcacatgttgcatctatctggatgtcgacctttccaatctctccattgtcgccgtcaccaccgctgttttgtttcatcgaatatttaatgatacgttcttcaccgggaaggacgtcgatgaaggctttggacatcgtaactttctctccttgaatggttgcgctgaggtcggcaatcagaatgttggtttcaccgatggatttgaaatatcctgcacgtgtttcgtcttttgcatattccaaacgcccttcaccgacggatacctggactttggagtcttcatccaacagcttttgaagttcgctgtcataggctattcttaccttgatattattcaaggtacaaaccagttctttaagatccgttaccgtattttcagtaatttcaaaatcctgtttggagaagtaatagggcttttcgaactctgccggttgtacttcgtgagacatggctgtgatactgtaatggcttacctttagcgtgaatatttcgggcatctcgctgcatttccactcttgcaccatttttccttctttatccatatcgtaaatgcggataatgaaattgtcggtattgattcctgcacgggtaactgtagtagctgttttctcgtctacggagacttttaatgcagacagtcctatttgaccttcggcacgattgtctatgtcgtcaggacctttttgggcgtttccccattgctcgcgttcgcatgaagagaataccagaatagcaaagaatgccagagtaaacagggtgtttgatttcttcatattttgttattcatatataagttctaaatcgtctattttgaggcggctgcctaaatgggtggtccagcctgttgcacaatctgtcaaatcaattgttccggctttctgtaaatcgtcactgccgaaagaggttttggttgttgatagaatattgacatatatgtcagttgctttttccatatttccttggtagtcgaggttgatatatgcttcctgatattcgctgtctgcagaacttgcggcttctgatatgtacgagccgcctgctatgactttattcccgctgcgtatctcgatttcaactttaaagttgtctgtctgatagggagtgtatttataccagaatttcattccgtagggtctggaggtgaaaggatgtccagttgttacggtctctttcttgtcactccaattataggtccctatgaataagcgtcctgcttttgctccctcggggtacatcgtgacaggggtactcgaatatcctccgccggaaccggctgtgtgaatctccgctgctttagcaccgctttttgcgtcttttacatagataacggccggacaggttgttgtctgtaccggtgccacaacccatgcttgggaatatttgttgtttgtattccaccatatatcagtagcacctttagtataagggtaataaaaatagtgggtgaaatctccaaaagtcccagcagaccaccgtgtatcggaatctgtatgccagtcttcaaaaccggaattgggtatctgtagtgcttcctcggtttttacggatacttcattcttgacggtaattgtattggttccatctattacggctttaaatatgtaatcggtgccaggctctaatccgctaacctcaaccgcattttttattttttcttgtgatggagaaaaccagtctcctgacgcttttctgcattttacggtaatatccttaaccgtcttcagatattcggttgttccttccgtgtctccaaccaaatagagagtggcttttttagcccatacatccccttcgggagcagtcagggaacaggatgattcaccgattcctactgtcacggtcttttctttatctcccgcaattacttttatctgttgaggttcctgcaacccgtctttgaacgtgatggttacttggtgcgtatctttgtcgctctctatgcttgtaggaactaaaggttgccaatagccgtatgcctgatattgatagctgactttggatatgtcccctttcaaaatgacggtcagcagtatggtagtgcttccacgttcggcattcataggcttggctacatcaaaaccattaggcagagatttgattttgagtaccaatggctctttgtttactttactcaatttgtctgttgcggtcaaggtaaatgtattttcttcgtctgtttccgaatgagatatattgaccagtacttttgtgaagtccaatattgccattttatcgacattggcacttaatccttttaactccagccccaaatcttgtaatgtggtaagcatgcctggttccggatttaccagatcaatctcggcaggccatcccttgcttaacagagaaggagagcgggttgtcaagacacatttggatattccgccacgcgccgtcagcaaggctgataaaggggattcgggttctgtccattccgttaactcccgggcaactcccgattcaaaccccgttggcgtaaagaacggtggctgtgtgttcaaggcatcgtccgaaatatctatggttatcggcactctttccgtttcgtccgtgaatgatacatccaattccgtaccccctgcttgtacgtcaaatttcagacggtaatgctggcgtgcctttgcattctctatggtagcggcttcaaatgtgactttgtttccttgttgtttgcttcctgacaggtaaatgcttatcttgccaggctttacgtatgcggcccttgtttcattcttgtcgaacgagatgtccgtactgccggcagggcgtatgtttacggtgtagtctgtaaaatattttttgaaaagttccgtgtattctgtcgtaacttttacattggcaagataacatatgaccgatatgtttgtactttcgttcttttttatggagaactcttttgctccttcgtagtaaggggcttcaaaaccttgggtttctatgtttccataagtggcctttagtgtatagttgccggctgcaatttccgttccgtctgtaaagtcggcatacctgttccaggtaagttgtacattattattttgaagaacggcaattgagaagtcgttgatgtcgggtaatgtctcttcatcagcggtagcacgtgttaccatgttttctacatttgtatcaactgctaatttcagattaagtctgccctggtttgcagtttgttcattctcccgctcacatccggtcaatgtaatacatattactgtaaacagggttagaaaagttgtatattttttacccattaacaacagtgtttggttatctttttacctgctaattcttgaagtcgggtacaaaaatatgttttttagatgagataattagcgcttatcgccttgttttgcagttataaatgaaaaatgggacatcatttgtcccatttttctcaaaaaaagaatagttgattaatctggttttaatcttgttttagacataaaatcttatcatgagggtagcaatactactccctgtttcttctttccgtccattttggcggttataggatgttcaaagtgcacgtgacgcaggtatttggactcatatacagcaggttgcgcattcagaaagtcttgattatacacaccgtcattcatgaaagcattgattgtgaaatagcctactccgaatgaagtcaggttctggaaaaagtgtgttccctggctaggatcgacacgatagttcgtcagtcctgcttctacaatgatacgcgctgcactgatgtggggccatttaacgggaataccgagccaggtatcactgctgccccaacgtcccggtcctatcagtacatagttcttgccctcgtccaaaaattgctggttcaatttttctatctcccaggctatttcctgattgtgggaagcgctgtagttgtcggtctttacataaattacatcctgtaattcattcattatgccatgtcctaacgaattattggaacggagcagcagtttttcatcgggaatggctgtgaggtcctcgtcaagcatttccttgctgtcgacaatcgggcgtatttgcaacaggtagaacgtcccggtcttgtccttttcacggttcatggtagctgcaaattcaatttctacaggacggcgcatttcctgctgtccgtatttcaatgccaattgcaaaatgcggggcagaggaaatacatcatgctgcaagatattggcgaaggtgataaccttgcgcccgcccggatataaaccgtcacggattatctggtcgtaagggtcgtaggtggaagctatatatttgagagcaccgtctttctcggcctcttttacgtgtaatttcaataggttgaaaccatcgtcaatggagaagtcatgtccggcgttacgcaggtcgagtgcataaaaacgtgtttgggtttctttgagcgcaatctccatttcgctggtttgcagaacttggttggggtgatagggagagaaccggagagtcataccgccgtctacgatgtatttgcccagcccgagtgccaggttgacaataccctcttcagctttttcgtctccgataggataatagttgagcgaacgcgccacgcccgacatggacgggtaataacggtcgccatactggttgccgaccacttcttgcaggattacggccattttctcctggtcgataacattgcttgtggcttgcatataagcctttgaatcgcggaaatatacagaagcgtaaactcccttgattgcatcgctgagcatacggagcatttcatacttatcgtccagataaggaatcatataagtattgtatataccggcgaaaggttggtaatgcgagtcttccaatagtgaggaagagcggatggcaataggtgattttaccacatcgaagaaagtgaaaaagtcctcaaccagacggtcgggcagtttggctttcagaaagtagcggagaatcacatcgtcgtcggcatcggacaaggctatctgatacaggttgttagtctccatgaattcatcgaacacatccgtacacagtactaccgttttgggtatggcaacgcgggcattttcaaattcgtcgaattccggatgatgttttaccatgttgtcaatgaatgccaggccacggcctttgccgcccagtgaaccgtcgccgatacgggcaaagttcgagtaacggtcgaaacggtcgcgtttgaaaacagctaccacaccctggtttttcatcttgcggtactttacaattgcttcaaagatgattttgcggtgggcatctacatcctgaagactgttccacgtaataggtttcaagaactcgccaatgggaaacatggcgcgtgaatagagccagcggctcacatggttgcggctgatatgatagaggaatgattctgccggtacggcaaagaggatattctgaagttctttcagattcttgacgcgggcaatctcttccagtgtgtcggggttgcggaagataaagtcgccgaaaccgaaattgtccgatacgatacggcgcaggtctacgtccattttctttgaattcttatcgataaaagccgcatcgtatttggctgcgtacgacacgttctccgattcggacgattgtataatcaatggaacaaacgggtcttctttccgtatggcggcacacagcttgataccagcgagtgcgtctttctcaccgcgttcaacgcgagggaagcggacgtcggtgataactcccagtatgttgttcttgtatttttcgtatatgccgattgcttcgttgtaggtacgtgcaaggacgattttagggcgccctctcatacgtagcgtacgttggtgggcattcaatgcttcagtggaaaactcctggctctgtttcaatacgaatttataaagattgggcaggatagaggagtagaaacggataccgtcttctaccagaagaataatctgtacgcccacttcactgacgtcgtgctccagattcatcttgtcctctatcagcttgatgatggaaaccagcaagtcggtgttccccagccagcagaagatataatcgaacgaactgagatcctcgttggcaatgcgtttggtgatgccgtggctgaacggggtcagaattaccatagggatgtgctcgtattgtcccttgatggttcgcgctacgtcaaatccctcattatctcccgttcccggcatacatataataaggtcgtatggcatggacgatagttgggacaatgcttcctcgcaagtagatacctgtgtaaagcgcggcggatagcgcagggagagtgaagtatattcattaaagattttttcgtcgatacggccgtcgtcttccagcatgaaagcatcataaggattggcgattaaaagcacattgaagatacgtcgcgtcatgaggttggcaaactgcgtatctttgaaatagagctggtttaatttaaacttactgagcatgttttctcatggtttattagttcggaggacaaaagtagcaatttaaatgaagaatgaggaatgaaggataaagaattacctttgcaagctgtttatacagttgtcccctgcttttttgtttgttgttcttttatattctatgtgatttgacgttttatcattatttaatcaaaatattgctgcaatgtttaggtgttttgaaaagttttcctatatttgcagtgttgtttattgacattttgttcaggcaacaaatagttaacaaggtaataacctttaaaacgtaatattatgaatatcgaacgtatcatgtcctctttggaggcaaagcatcccggcgagtctgaatatcttcaagccgtaaaggaagtacttctttctatcgaagatatctacaatcagcatcctgagttcgagaaagcgaaaatcatagaacggttggttgaacccgatcgtatttttactttccgtgttacgtgggtggatgataaaggcgaggtgcagactaatctcggttatcgcgtacagttcaataatgctatcggcccgtacaaaggcggtattcgtttccacgcttcagtaaacctctctatcttgaagttcttggggtttgaacagactttcaagaatgctttgaccactctgcctatgggtggcggtaaaggcggttccgatttctctccgcgcggtaagagcgatgcggaagtgatgcgtttctgtcaggctttcatgttggaattgtggcgtcacctcggtccggatatggacgtacccgccggtgatattggtgtaggtggtcgtgaagtgggctatatgttcggtatgtataagaaactgacacgcgaatttacaggaactttcacgggtaaaggtctggaattcggcggttcattgatacgtcccgaagcaaccggtttcggtggattgtattttgtaaaccagatgttggaaaccaaaggtatagatatcaagggtaagacggttgctatctccggtttcggaaatgtggcttggggtgcagctaccaaggctacccagttgggtgctaaggtcattacgatttccggtcccgacggttatatctatgacccgaacggcatcagtggcaagaagatagattatatgttggaactccgtgcatcgggcaatgatatcgtagctccgtatgccgatgaattccccggctctactttcgttcccggcaaacgtccgtgggaggtgaaagccgatattgctttgccttgtgcaacgcagaatgagttgaatggggaagatgcacagcatctgattgataataaggtgacttgtgtgggcgaaatctccaatatgggatgtacccccgaagctatcgacctctttattgaaaacaagattatgtatgcaccgggtaaggctgtgaatgcaggcggtgtggctaccagcggattggaaatgtcacagaatgcaatgcatctcagttggagtgcggctgaggtagacgagaaacttcatgccattatgcacggtatccatgctcagtgcgtgaaatacggaacagaacccgacggctacatcaattacgtgaagggtgctaatatcgccggcttcatgaaagtagcccacgccatgatgggtcagggaattatctaaggaaaaactttgtttagttgtatttgtatttgtggtttgtgctgcctgcgcctgtgaaggtgcaggcagcacttttttactatttgtgggtattattgtttttaatatagttatttatcggtattgtgccagctacctgtgcgatctaactttgcagcgtgaaaattaatttattaacgctaaaaaggaataagctaaaatgaaaattaaagatgtattggtcatggcggccatcggtttattaggagcagcatgcagtgatgacgataataagggtagtcaatggggagacggagttggaggtacgaaaacgaatctggatgtatctgcctatgataaatggacttatgtaaatctgaaaaccggagaaacggaaatacatccggatacaagcgaatggatttatacggatggttcggtaagcgagccaaaagcgaaggaaactatcggtatcgaatggcatatcgccatacaccgttatgagataaaaacaaacggtggcatggttttcgatacggagaaaacaaatatgaatgaaattacggagttgcctgaaggagactataaagcggatgaaaacataacaaacgaggatgaagaatatgccatcatcaccgatatgagcaaaatgatgcaaggcaacgtcggttacgccaagactgcaactgtgaacaaagtgttgtgcagttgggtgaaaaagacggagacaggtagtatgcctcctactatttatgaaccgacaatgcatgtgatagttttgaagtgtaaggacggcagttgggcgaagcttcaatttacagttgcaggaaactctgaaacgaataagagcggttttgttacattcaattacgaatttatcccgattaaataagaatgagacgggttctttgttccttactttttttgctggcagcggcagtgcccactgtctttgcggaggaagtggacgaaagggatagcaaccgttatcgctattccatattgggagatgtcgtagatgaaaacgggcagccaatgcctggagctacggttagggtgctgggaactactttcggagcaggtacggatagcgacggtgaatttgttatccgtttggaaaatgcgaaagaatatacgctgttggtttcattcataggatacgaatctcaggaaataaaagcggttccggctgtacgtccgctgcgactgcatatccgattggttccttcttctaatcaactgaatgatgtagtggtaaccggttcgtttgttgcaaaaccgttgaaagaggtacctgtactgacgcgtgtaatatctcaaaaggagattcaggcactcaatccgatgaatgtcgaaactttgctgcaatacgaactgccgggtttgcagattgggtataattccatgagtcagatgcctgagatatcttatcaaggcatggatggagagtatatgctgtttttgatagacggcgaacgcgtaagtggggaaggagccgaccataatgttgattttacccgtttcaatgtagacgatatcgaacgtatagaagtcattaagggagcccagtccacaatctatggttccaatgcattgggtggagtcatcaatatcattacaaagaccgccaatcgtccctttagcggaaatttgaatgcacgttatgccggttccaacggacagaaatatacagcttctaccggtgtgaagaaaaatcgtcttacttcttataccagccttacctatcgtacaaaagatacttatgagataggtgatgaggtaggtaagaccaccgtaacggaaggaagtgacggttcttcggcagagaagcaggcagatgccggttccaccacggtctacggatacaacatttgggattttttgcagaaaataggatatacctgcaatgaaaagctaaatgcggatttgaaaggttcgttttaccgcaataaacgggacaagcgtgtgggcaagatgtaccaggacatattccttgattataccttgaacggtaaggtaacatatcttcccggagaaaaacagcaacttgtaataggatatatttatgataattatcagaagaaccaggactatttcttatccggaaagaaaactacggattaccgtaatatcaagcagacaccgcgtatcgattataccggaacattcggcaagcatactgtcagtgtcgggttcgaaggtgactttgagtacctgaaacattatatgctggaagacagctcccatgttaacaaccagttgtacgctttctatgcgcaggaagactgggatatcctcgatgagctgaatatcgtggcgggagtacgtgccgactatcatgagaaatatcattggcatgtcactccgaaggtttctttactgtggcatttttgcgaccatgtctctttccgtgccggttatgcacaaggattccgttcgccttctctgaaagaactctaccaggcatacgatatgggcggtatgggttggttcatgctgtatggtaatccggatttgaaaccggaaaccagcaatcaagtctctctgtccggcgagtttaccaagggagggctgaacatgtcggtttcttttgcccacaaccgtttcaggaacaagatagcctatatgtcattgggcgacggttcgagcgacatgcaatatgtaaatgccgataacgccaaaactacggctttggagacaattttgcgctaccgttttggtttcgggctgatattgacaggttcttatgcttatacgaacgattatgaagaggttgacggacggaatacttctttggtgcgcccgcatacggcaactttcaatgctatgtattcgcataagttcggaaagataggttttaactgttcgctgaacgggcagtggggggcaaagttcgatacttatacaagaaaccaaaatgatgacggtacttatgcgtatgaaataaccacttacgatgcacgtacgatgtgttcgttgaataccggagttacccttccgaaaggcatatccctcaatctgggtatcgataacctgttcaattataaagacaaggctgccgatagttccctgcaggttccgcaaaaaggaatcagtgtaataggaaccgtaaatcttaatattgcagatatgttcgggttataaatattaaaatatcgatatgaagaaaaaacaactattggggagcggctgtgcggccgtcctcgtgttgctgcttataggtatctggaacttatggttcagttctacaagagtagcatttgtcaattatcaagttatcagtctcggacaaatatccaaggctaatgataattcatttataaagatagcagaagtcagtaccgacgaactggatcaactgacttcctacgacatggtatttatcaatgccatggggatgagaataacggaagaacagcgtgcgcagatacagaaggctgctgatggcggcttgcccattctgaccacttccgccaccaatcctgccaatgagataatttcgctggactctatccaggccgacactttgagaagttatctggggaatggcgggcgccgtaactaccgtagcatgctgaattatgtacgtaagcatatcgacggtaagcttatttcggtagacgaacctgaagctgtaacagaacgctccaatgatatgatatatcatgccgacccgaagaagccggatgatgaagaactcggtttcaatacgatagccggatacaatgctttcctgcaggaaaacgggctgttgcaagagggagctccccgtatcataatcactggtatgatgggcgaaccggcagaccttatccggaaactggaggaaacgggtaatgtcgtttatccggtacggaatatgaaaggcttcattggcaggcaccaaattgattcggtatccccctcggcagtcatcaatatggcgcacgggcgcatgggagactatatcgtggattacctggcacaacagaatatcccgttgtttactccgctgaatgtaaaccggctcgtagaagagtgggagaacgacaaaatgggaatgagcggcggatttctctcgcaaagtgtcgtaacccccgaaatagacggggctatccgtcctttcgctttgttcggacattatagggatgaagaaggattgcagcatgcttttgccattcccgagcgtttggaaacttttgtagagacggtgaataactatattaagttgcagaacaagcccaataatgaaaagcgcgtggcgatttattattataaaggcccgggacagaacgcaatggctgctgccggtatggaagttgccccttcgctttacaacctattgctgcatttgaagaaagaagggtataaggtagacggcttgccggcatcctccaaagaactggaacgtatgatacaagcacagggagctgtattcggaacgtatgcggaaggagctttcgacaactttatgaagaacgggcatcccgaactgattaccaaagaacagtacgaaagttgggtagggaaagtactcaggccggaaaagtatgcggaggtcgtatcttccttcggagaatttcccggtgagtatatggctaccgatgacggacgcctgggagttgcccgcttacagttcgggaatgtggtgttgctgccgcaaaatgccgccggaaagggagacaatgcgtttaagattgttcatggtacggatgccgcacctcctcacacttatattgcatcttatttgtggacgcagttcggttttaaggccgatgcgttgattcacttcggtactcatggcagtctggaatttacaccgaaaaagcaggttgctttgagtagtaacgactggcccgaccggctggtaggcgctttgcctcatttctatatttattcgataggaaatgtgggagaaggtatgatagccaaacgcagggcatatgcaggcttgcagtcttacctcacccctccgttcctcgagagcagtgtccgtggtatctatcgtgaacttgtggagaaaattaagatatacaataatgctgtcagtgcttgttctaacggtgcgcacgaacaggaatcccggaaagatatgcgtagcgaagtcgatttgcgccgtgcttctttggctgtgaaggcagtggcggtgaagctgggtattcaccgcgagctggaactggacagcgtactcaccgttccttatacggaagacgagattttgcgtatcgagaattttgccgaggaactggctacggagaaaataacgggacagctttatacaatgggcgttccttatgaagatgcgcgcattaagagcagcgtgtacgccatggctaccgaaccgattgcatacagcctgcttgccctggacaaactccgcaaacgcgccgacgaaaaaacggtgaaacaccgcgctttgttcacacagcattatctgaatcctgcccgtactttaataacccggttgctggctaatccggctttgggaacggatgagctcatctgccgtgtggcggatatcacgcccgacgaacttgccaaagcccggaagatggaaaaatcgcgtaatgcgccgcagggcatgatggcgatgatgatggctatgggagacggagagaaagccccaatgaagaaaatgccttcttccgtagaatataccaaagaagaaatcacttttgctttggcagtcatggaagtcgagcgcacaattaaaaatgtcggagaatataaaaaggcacttatagaaagtccggaaaaagaactgctcagcatgacgaatgcattgaacggtggatatacccagccttcaccggggggcgacccgatagtaaatcccaataccttgcctaccggacgcaacctctatggaatcaatgcagaggctaccccgagcgaggcggcatgggagaaaggcatacagttggcaaataatacaatcgaaatgtataaacgccggcacaatgatagcattccccgtaaagtaagctatacgctgtggagcggcgagttcatcgagacggaaggagccactatcgcccagatactctatatgctgggtgtggaacctctgcgggatgctttcggccgtgttacggatttgaaactcatcccctcgaaagaactgggacgcccgcgtatcgatgtggtagtacagacgagcgggcagttgagggacattgcagcttcccgcctgttccttattaaccgagcggttgaaatggctgcccatgcaaaagacgaccagtacgaaaatcaggttgctgccggagtggtcgaagcagaacgggtattgatagaaaaaggtctgactcctaaagacgccagggagatttctacgttccgcgtgttcggaggagctaacggcggttatggaaccggtatccagggtatggtgatgagcggtgaccgttgggaaagcgagaaagaaatagcagatacctatttgaacaatatgggtgcttactatggtagtgaaaagaattgggaagccttccgtcaattcgctttcgaagctgcgctgacacgtacggatgcggttatacagcctcgccagagcaatacgtggggagcattgagcctcgaccacgtgtacgagtttatgggcgggctcaacctggctgttcgtaatgtgacgggaaaagacccggatgcttacctgagcgattaccgcaatcgcaacaacttccgcatgcaggaggtcaaggaagctatcggagtggagagccgtacgactatcttcaatcctacctatatcaaggagaaaatgaaaggagaagcaggtgctgcgaatacatttgccgagattgtacaaaacacatatggctggaatgtgatgaagcccaaagctatcgataaggaaatgtgggatgagatatataatgtgtacgtaaaggataagttcggcctgggcttgcaggaatatttcgagcaacagaatccggcagctttggaggagatgactgctgttatgctggaaactgtgcgcaaggggatgtggagagccagcgagcagcaagtggccgatatagccaagttgcatactgatttggtaaacaagtacaaaccctcctgttccggctttgtttgcgacaatgccaagttaaggcagttcattgcttcgaaaaccgatgtgcaggcagcggcggaatatacgaaaaacattgttcagatacgtgaagctgccgcatccgatgacaagaaagggatggtgatgaaaaaagaggagatggcttctaccgcagaagaacagaccaatgtactgagcaatacgatagtcggtttggtagtagtgcttgctatcgtcgtactgttgttactcgtccgtcatcgtcgtaaaaaactacaggaataatggaaacggttgtttttgtacttatgatattggtttgcttcaacttcatgttgaagcaaacttatcgtaaattaaggtcggtgctggtaatatccgtcatctgtgccttgtttgtagggctgatgtggccttatgctatcgagcagtccaaaacccagattgccgactggctggctaatcctgcactgatgctcgatacttccgttgtactgagcgtggaagtggttctgcagatggccttctgcatgctggctgcacatatccaaagtgccggacctgtgaagaagcgcgtgctatgggcttataaggcactgcgctggtttccgggtattttagtttttccggtgctgttctgcggcttggtcgcattgatattctccttccccggggtatccttttccctgattgcctggagcatggcagcggcggtattcgtattgatacctgccgggagcttccttttgcgctggttactgcccgaaaaagaacttcggctggaattgcttttcctcgccaatgccctgattgctattttgggaattatcgctactgtcaatggccgtacggcagtgaaaggaatagacgaggtagactggggagcgttggcaggcttgacaatcctgcttgttgccggtgcattggtcggaatgattttaagaaaagtgaaattgaaaagacaaactaactaattaaataaaaattatgaattacatttcagacattctctattggatatctacagggcttctggttcctgttatcgtattgttgattattcttttcggacgttcggtcttgctcctcggaaattttttcgggcaatacctggctatccgtaagaccgatgccttgctgcgcaaggagttggatgcactgactcctgaaacagtttcggagctgggcggacacctctccaagaagaacaactctttggtggttgcttacattcaccgtattatcgagatgaaagacagtccggcgcacgtgcagcgcctgcttgccgattttgagatagcggcggataaagatttggcaatatccaagactctaaccaaaatgggaccgatgttgggattaatgggaacgctgattccaatgggtccggcacttgtagggctttccaccggcgacattgcctcgatggcctacaatatgcaggtggcatttgccactacggttgtcgggctgttctccagtgctatcgggtttataacacagcaagtcaagcagcgttggtatttgcaggatatgactaatctcgaatttctctctgagttgttaaaccaaaatcaaaaagaataatgaaaaggcgtttgctgagaaaaggagaagatagcgacccgatgagtgtggtaagcaatcttttcgatgttgcaatggtatttgccgtagcacttatggttgcattggtgagccgttacaatatgaccgagatgttcagtcaggaagatttcactatggtaaagaatcccggaaaagagaacatggagattattacgaaagaaggtcagaaaatcaataaatatactccgtcggagaatcaggatgccaaaagcggtaaaaaaggcaaaaaggtagggattgcttatgagttggataacggcgagattatttatgtgcccgaagagtaattccattgcacctaaaattattacctttgctgctcgaaatttataaataactaagagatgttacaaccggaattgaaattaagacgtgataagatacgtgccctcatggcccaacaaggtatcgatgcggcacttattacctgcaatgtaaacttaatctatacgtatggttgcgtagtaagcggctatttatatctgccgttgaatgctcctgcgcgtttgttcataaagcgccctaacgatattgagggcgagcatattcatcctatccgtaagccggagcaaataaccggattattgaaagaatgcggtcttcctttgccggtcaagttgatgctggagggtgatgaactaccctttacggaatataatcgtttggctgcctgctttcccgaaacagaggtcgtgccttgcggcactgcgttgattcgtcaggcacgaagcgtaaaaactccgatggaaatcgaaatgttccgtcgttccggagctgcccatacaaaggcatacgaacagattccctcggtttatcagccgggaatgaccgaccgtcaattatctgttgaaatagagcggttgatgcgtctggaaggttgtctgggtattttccgcgtattcggacagagtatggaaatcttcatgggaagtcttttggccggtgacaatgcagcggttccttctccgtatgattttgcattgggcggcaaagggcttgatccttcattgcccggtggcgtgagcggcactctcctgcaagcggggcaatgtttcatggtggatatgggtggaaacttctatggttacatgggcgatatgagccgtgtgttctccattggcaagttgccggaacaggcctatgctgcacatcagacgtgtttagaaatacaagaggagattgtggcaatggcaaaaccgggaactgtttgtgaagatatgtataacagggctattgaaatagtaacgaaagccggttttgcggattattttatgggagtagaccaaaaagcaaaattcatagggcatggcattggtttggaaataaatgaaatgcccgtattggctcctcgtatgaagcaggaattggaaccgggtatggtttttgctttggaacccaagattgttttacccggtataggtcctgtcggaattgaaaactcatgggcagtaaccaccgacggccttgagaaactgactttgtgcaaagaagaaatcatagaattatgatggataattagtggttagtgattagtggttagcgattagtgattaggttggtaattacgtcgcatgacagttgctaatcgttaaccgctaatcactaatcactaaccgcttacttcacccttctgtttaattggttattagccttggacggttttgattttccgattctttttcctgtcggtttggcttttttgttccggttagggtgcgattgtgcgtttttattccccttcataatattcacatagataataacgggcgataaagtcccaattttgctgtagtatttctttgccgttgtcaaatggaaattgcacatctggtaatattcctttgagcataccgtactttattaagtcgaacgggcaggctcccgggcggcaaaagagtttgtagccttcggcagcagcgcgtttggcattgtacatcgggttgtgctcttcacaaaaataggcagctacatcgtgggctattagcatacctttggcattggcgtatattacgaattctttcttgtactgtaagtcaggaagtaaagcagaacgggtattttcccattttagaacttcaacaaagaatttgcagagttctttataggtagcaaaatataataaaggtttgccaccgctgtattccagacaatgctccacatccttgctcagttttgtttcaggagtgatttcgggaagaggaacaaagggcatatctaacaaatccggtcccattacccataaaaaagaagaagttttttcattgataggcgcttcttcaaatttttcgtccatcattttataagcttcctgagctaaagccaacaagtccttatcatacggattttgtaacgtatattcatccggtccatagagtgcgaagtgtgattttaatgtccacagtacaaatgctatatcttccggattgatttcatcggggatgtagctgtcggatagcggatagaagggaaggtaggtattatactgtttgtagtataattcggtgaatgtcttccaaccgccggtctgggcaattacatcctgaaaatacatagtgagtgatactgtggcatctttctgcgcatagtcatcttccttgaatagaggagattgctttactaacgataggatacttgctgaaaaattgagataccattggtcgccgggtagtacacgtgtacgttcgttggcagccaaccattgtttcatgggaataggaactggcttcattgcttgtttacttttaatgtatgaataatatgtatggactataatcttttcagagccagcttgataacctgttctaccggtgcattggcatcttccttcaaaatagccgttactactttttgtgaaggagcttgtgcaaatcccagcattgtaagggcggctacagcttcttcttgtacttgtgcattggcggcggtaaaggcaggaccggttatgtcaaccgctccggaagccattccacaggtttttattttgtcttttaaatcgactatcacacgctgggctgtttttaaaccgattcctttcaccgttttcagcaagttggcattctccgtgctgataacatttatcaattcggaaggcgataaagccgaaagaatcatgcgggccgtattgccgccgatgcctgatacggaaatcagcagaaggaacagctcacgctcttgcttgtctgcaaaaccataaaggatataggcgtcttcgcggatagcttcatagatatatagcttgcagcttttctttccttgtatggcagcatatgtgttcagggaaatatttacggcatatcccaaaccgttacagtctatagttgcgcttgccggactcagctcggcaatttcacctttaatgtattctatcatatgattattattcctaattctgcgaatgtaggaattattattgacttttagtctctaaaaaaagaaaaactctgtgaaacttgagggcttctatagttaagttataaattaaaatgcttacttttgcgctcataaaatagaaagttgataactaaaaccgataaaaagatgaaaaaagtaagagcagccatcgtgggttatggcaatatcggacattttgtacttgaggcattacaggcagctcctgatttcgaaatcgcaggagtagtacgtcgtgcaggggcagagaaccgtcctgcagaattgagtgaatattccgtagtgaaagatatcaaagagttgaaggatgtggatgtggccatcctttgtactcctacgcgtagcgttgagaaatatgctaaagagatattggcacttggcatccatacagtggacagcttcgatattcataccggtattccggcattgcgccgtacactggatgctgaggcaaaagcacataatactgtttctattatttctgccggttgggatccgggaagcgattctgttgtgcgtaccttgctggaggctattgcgccgaagggaattacctataccaacttcggtccgggtatgagtatggggcatacggtggcagtaaaggctatcgagggtgtaaaagccgccctttcaatgacgattcctaccggtacgggcatacatcgccgtatggtctacatcgaactgaacgatggttacgaatttgacaaagtagctgccgccatcaaagccgatccgtatttcgtaaatgacgaaacgcatgtgaaacttgttccgagcgtagatgcactgcttgatatgggacacggtgtaaacctgacccgtaagggcgtttccggaaaaacacagaaccaactgttcgaattcaacatgcgcatcaataatccggcgcttactgcgcaagtgctggtatgtgtggcacgtgctgcaatgcgtcagcaaccgggttgctatacaatggttgagattccggttatcgaccttctgccgggcgaccgtgaagagtggattgcacacctggtataaaaatataaaaaaacagatggtgcgtttatatggaatgcaccatctgttagtactgaacgcatcgtctgttatagtcaaacagacgatgtgttttttatatcctaaccatcagaagaagaatctgagcacatcattgaagttagcccaaatcagcaagccgaacaataggaacatacctaccatttgagcacgctccataaacttatcgctgggtttgcgacgtgctacaatctcgtagatgaggaacaggacatgtccgccgtccaatgccggaataggcagaatgttcatgaaagcaagaatgattgaaaggaatgccgtcatgtaccagaactgataccagtcccatgttgcagggaagatgctgccgattgttccgaaaccgccaagctgtttggcaccctctttagagaaaagatacttcatctggctgacataacctttcagcgtatttactcccagggtaaccccggccgggatagatgcgaagaaactatattctttcttgacaacgggcaacagcttgtttgtctgcagggatgcagcgacaccgatttgatataaagaatctgtagtcagctttacggtatccgctacccccgctctgacgtaagtcagggtgagaaggcggctggtactgtcgttagctgctttttggcgattcagcatttcttccttaaagtcgaagtaagcgatgttacgtccatccaattgagtgatgctgtcacccggttgtaatccggcaagtgcggcaggttgtcccggcataatgctgtcgatgacaaacggatagcggaatgaagcgaaacggacactgtcggcaagcaggcgttccatcatatcttcggggatgtacacggatacttcctgcccgttacgcaatacgctgacctgacgtgcatcgacgatgcttgtcagcatgtctccaccatagcgttcaaaaggtacgccgtcggcggataccaatatatcgccgtcacggaaaccgattgatttagccgtttcattaaagtccatacccagcggggctttctgcaaaggtacatattcatctccccacgcaaagagtatcatggagtagatgaacaatgccaacaggaaattgaacagtacgccgcctatcataatcagcagacgctgccatgccggtttggcacggaactcccacggttgcatgggctgtttcatctgctcggtatccatagactcgtctatcatacctgcaattttgacgtacccgcctaaaggcaaccagccgataccatattccgtttcactgtttttcggtttgaatttgaacaaggtgaaccacgggtcaaagaacaaacagaatttttccactcgtgtcttaaataaacgagcgaagaggaagtgcccgccttcatggattattacgagcaatgaaaggctcattataagttgcagggcacggatcaagaatgtttccatctaattatttactattttattatttgcaatttaatttttaactatcaattcttttgctattcgtctggcttctgcgtcagttgccacatagtcttcgtaagcaggtttttgtataaaggatacgcgcgccattgtcttctcgattacgtcgctcatgccgaggaatgatatttcgtctcgtaggaaagcggctaccaccacctcattggctgcattgacgatacatggcatgtttcctgcacggtgcagcgcttcgtatgccagcgccaggttgcggaaacgttttgtatccggctgctcgaatgtcaggtccgtgcacaatttgaagtccagccgggggaaagacgctttcaggcgttccggataggagaatgcgtactgaatgggcaggcgcatatccggcattcccaactgcgctttcactgctccgtcctcaaactgcaccattgagtgaatgacggattgcggatgtaccactacttctatctggtcggggcgtacaccgaacagccattttgcttcaatcacttcaaaccccttgttcatcatggaagcggagtctattgtaattttggctcccatgtcccaattggggtgcttcaaagcctgtgccttggttacggtggcaagctgctctattgtacaggtacggaacgggccgccggaagctgtcagtataactttctcgacagggttacccatttctccggctaaacactggaacacggcagaatgttcggagtctaccggtaagatgggagtaccgctgaaacgtgccaggtcgttgataagttcgcccgccacgactaatgtttctttgttggcgagggctatcgtcttgcgtgcacggattgcgttcatagtcggtttcagcccggcatagcctaccatagctgtcagtaccatgtcgataggtttttccgccacaatctggcataaggcctcttcgccggcatacactttgatggggaggtcggcaagtgcgtctttcagttgttgatatttcgtttcgtttgctattaccactgcctcaggcttgaacttgcgtgcctgggcaatcaaatcctctacccggttgttggctgtcagtacataggcttcgtatcggtcgggatgttcctctatgacctgtaatgcctgtgtaccgatagagccggtagagccaagtatggcaatttgtttcttcatcagtcttataatttatgctttcaggtttatatcttatacttaatgctttatacttttaaaatacgatatagagttccgggtttaccgcccttcctttgtgccacagttcgaagtgcaggtgcggtccggtagtcagttgtccgctgttgcctaccagggcaatggcttctccgccttttacggtgtcaccttcgcgtttcaacaaagagccgcaatgcttgtagacggatacgaaatcctggttatgctgtacctctatcaaatagccggtttcggctgtataggtactcagaatgaccgttccgtccagggttgccaatacgctttctcccggattggcggctatatccgttccgaagtgcctcttttcggcattgaaaggagatgaaatcatgccgcgggtggggcggtagaatatcagtccgtctacttcggggcgtgaggcgatgctcgtcaggttgtatttctccgtttcctcgtactgtttgcggaattcagcctcgcgttgcgttcgttccataagcgaatcttcccgtacggtagtcagggagtcgatggaatggatggtgtcggttttgattttacccagaaagatgtcctggatattcattatgtacagattctgcctgtctacgagttgctggagcgagtctacacgcagggcattctccacgacctgcgcacgaatttcactgttcatgtatccgggcagataattgcgcaacggggtaaaggcaacaatcagggaggcaatcagaaagagtaccgtcagtacggaaagcaatacggagattccgttcagtttggacacacgtaaggtgacaatatcctcaagggtattctcgttcgtaatggtcagtctgtatttgaacttgatattactccaaaaggcttttcttctttttttcttcttatttgctgccacttataaactttctatttataatttgaactttgcgtttcgcgccttattcacgcttcttccgtatcgtctaaagcaagtaatccttccggcaggtccaccgtgataaccttatgcttctggtcgatgtccataatgaaatcttcctgtgccggaatcagcaattcttctcctttataatctaccacgaacagagtgttgatggtagaggtatccacatccgtcacttcacccagctggccgtggtgtacttcttccatacggaaaccgatgaagaaatcccaactgagttctcccggtccggctccctcggcatgcttcacgggaaaataaacctcaatgttggtaaacatccgtgcgcgttctgccgtatccactccttcgagtttgacgagagccgtagtgtctgagcggaaacgatattcttcgataaagaacggtacgaatataccgtccaacaggcagatgagatattcggcctctacacggtcgaaaatatcatccgtaaaggtgaatgacaattctccgtgaatgccatgaggtttgttgaatatacctattttatatacttcttcttttcgtatcatatcgttttatcgccttgtctgttgcttgtcacttccttatattctcgttattcttgctccgatcgcattcagccgtccttctatattctgatacccccggtctatctgctcgatgttatgaatacggctgatgccgtcggcgctcatggcggctatcagcagagcaataccggcacggatatccggggacgtcatattgccgccacgcagtttgaaaccgtgattatgtccgattactacagcgcggtgcgggtcgcacagaatgatttgcgctcccatgtctatcagtttgtccacgaagaagaggcggctttcaaacatcttctgatgaatcagcacgctgcctttcgcctgtgtggcaactaccagcagtacgctcagcaagtccggcgtcagtccgggccagggtgcatcggctattgtcatgatagaaccgtcaatgaaggattctatctgataagtatcctgggcaggcacataaatatcatcgccccgttgttccattttgatgcccaaacgccggaaactgtcggggatgatacctaagttttcgtgcgaaacgttcttgatggtcagctcgcttttcgtcatggctgccatgccgatgaagcttcccacttcaatcatgtccggaagaacggtatgctctgttccgtgcagttcgtccactccctcaatggtgagcagattggaagcgataccttctatctttgcacccatgcggttcagcatccggcatagctgttgtatgtaaggctcgcaggcggcattgtaaatggttgttttacctttggccaatactgctgccattacgatattggcagtgcccgttacagatgcttcgtccagcaacatatagctgccttgcaattgccgggcggatatttcgtaaacttcccgtctttcattgtaaacgaattctgcacctaaattccgtatgccgatgaaatgggtgtccaaacggcggcggcctatcttgtctccgcccggtttggaaatcatagccttgccaaagcgtgccaccatcggtcctacgagcatgaccgaaccgcgcaggctggagcaccttttcaggaattcatcgctctccagataggcaaaatcaacattggctgcttgaaagctatatgtatcgatgccttttttcgatacgttcactcccatatcccgcatcaactgaatcaggttgttcacatccaggatgtccggtatgttgtgcaccgtcacctcttcggcagtgagcagggtggcgcagataatctgcagcacctcgttcttcgctccttgaggataaatgtctccggaaaggctgtgtccgccttctattacaaatgaagccatgaaatagtggttagtagttagtgattagcgattaacggttagtgattagggtagcgtggtgatgtcctatgatattaaccgttaatcgctaatcactaaccgctattttagtattttcttttattatttctgttgttgtttctgttgttctggttattcatcttcggccgataattctgttcgatccgttcggccataaggcggagaaggctgtcggtcatctgcagtttgccgccggacagttctgcgaggtcgtccgctattttgcggtcgtcgacagtatctttattccaggacatatagtctttcttcatgtggttgcatatcagtgcaacgaggttctgcttctcgtcaccttcgggaaagtcgatggctttcttaatcagcacttccagggtacggccgtagtggcggtaacgtattttggtgctgggataaggaacggtttccggtttggttatcaggttgtctttgcggataacttcgtatggatagtcgatgtccagcttgaagtccgccatgatggcaagatgatcccacagcttgtgcttgaaatcgggtatgtcgcgaaggtggggaaacatgtttcccatgatgttgataatggtatttgcacaacgctggcgctcggagcggtcttcgattgtaagtgcatggtctaccatattctggatgctgcgcccgtattcgggcaaaggcatccgcttttgttgagtattatattgcatatcctttagaattagcggttggttattagtggttagtgattagcggttagtgattagcggttagtggttaatgattagtgattaatgctatacggtctaattgcgcagcccgctaatcgctaatcactaaccactaatcgctataaaagttttttcggttggcttgctacgaattctttcaagtagaacggttcgaagtaggcaacgtctttaaaatctttttcggctatagctttttctgccagcgggaacatcatgcttgccagcggacggatgccgtcgatgaaatgagcgttgggatgcacaatcttttccttgcacttggctgcaccgtcgccgaagaaatacacgggctgcctgtccagaaactcctgataggagttttcgtccacaatgtctgccgcaatgtcgcgtaccggtttcagtgcgcggtcgtaaacggcggcgtacacttccatgcggcgggcatcaatcatggggcacaacagggcgtcttccggcagctcatcgtgatagagcagtaccggaacgcattgcactttcagggtgggaagcccgatgaggggcaggttgcgcccgtaacatacaccttttgccatagacacgccgatgcgtagccctgtgtacgaaccgggaccgcaacttacggcaacggcatccagcggcatggcgtggctgtcggcaaatgacagggcttcgtctacgaatacgcccagcgatacggcgtgtgaaggcccgttcaggtcttcttttttgaaaacgttctgtccgtcctcgctcacggctacggagcaggccgaagtggatgtttcaatatgcaagatacatgacataacttctattctgatttttattgtggcaaatttacgtgatttgtttcgattacacaagttgtttgccgaatggtttgtcgttgcattcctgattcattgattaaattgccggctgcttgcttgcatctgttcagaaaattagcgaatattgcatactaaattgtgcatgcgatatttgtctattgctcaaattattctcagtgaatgcaataaataatcagtgagaatagctatctttgtcgcataaaactatacattatgatacaatctatgacgggctacggcaaagcaacagccgaactgtccgataagaaaatcaatattgaaattaagtcgcttaacagcaaagcgatggatttatctgcccgtatcgctccgctttacagggaaaaggaaatggaaatccgtaacgaaatatccaaaatgctggaacggggcaaggtcgatttcagcctttggattgagaagaaagatgcggaacaactggccactcctatcaatcaggaattggtggaggcttattacaaacggattaaggaaatttctgcggcagccggtattcccgaacctgccgactggtttgccacgctgctccgtatgccggatgtaatgacgaagaatgagactcaggagctgagcgatgaggaatgggcagtggtgcatgcagcagtggaagaggctatcaatcatctgatagacttccgcaagcaggagggcgcagcgctcgaaaagaaattccgtgagaagatagagaatatagcacggttgctcgaatcggtggctccctacgagcaggaacgggtaggcaaggtaaaggaccgtatcaccgatgcgcttgaaaagacattgagtgtggattacgacaagaaccgcctggaacaggaacttatctattacatcgagaaactcgatatcaacgaagaaaagcagcgtctttccaatcacctgaaatattttatcagcacgctcgaaagcggtagtggacaaggtaagaagctgggtttcatcgcacaggaaatgggccgcgaaatcaatacgctgggcagcaagtccaatcatgccgaaatgcagaagattgtagtgcagatgaaggacgagctggagcaaatcaaggaacaggtcctgaacgtgatgtaaggaaccggttccggacgttgcataaatttatgataagtttgcttcaacatgaagttaaagcaaaccaattagaggattaaatagtaaactgttaaatagtaaataccacagatgggtaaactgattatattttccgccccttccgggtcgggcaagtccacaattatcaactatctgttgacgcagaacctgaatctggctttctctatttcggcaaccagccgtccgccgcgcggcacggagcagaacggggtggagtatttctttctcactcccgatgagttccggagccgcatagccaacgatgagttcctggaatacgaggaagtgtatcaggaccgcttctacggaacactgaaagcacaggtggaaaagcaactggctgccggacagaatgttgtattcgatgtagacgtagtgggcggttgcaatatcaagaagttctacggcgagcgtgctttgtccgttttcatccagccgccttcggtggaggaattgcgcaaacgcttgataggccgcggcacggatgctcccgaagttatcgagagccgtgtggcgaaggccgaatacgagcttggctttgcaccgaaattcgatacggtcattgtaaacgatgatttggaaacggctaaagcggaggcattgaaagtgataacccaattcctgaaccgatgaagcagacgaaaggcagaaatctgtcgccgagagccaataaggtcctcttagtcctgaatatcgttctgtttttgggagctatcgtcttggctatattgaatgttgacctgaaggagtacactccggctgcggccatgcttattgtgatgttcataagcggcgtaaatatttacggctgttggaaacgcctgaaaggaaagctttgataccatagccttctgtatttttttaattcttaattttcaatttatcaagtggatataggcattttcagcggttcgttcaatccggtacacatcggacatctggcgcttgccaactatctttgtgaatacgaagggttggacgaggtgtggttcatggtgactccacataatccgctgaaagaagaagcctctctgatgagcgatgaattccgtctgaagctggtgcagcttgccattggaggctatcccaagttccgggcttccgatttcgagtttcatctgccgcgtccgtcttataccgtgcatacgcttgataaattaaaacagacttatccgcaagacactttccaccttattataggttccgacaactggaagcttttctcccggtggtatcagtcggagcgtattcttgcggaaaactttattcttatttatccccgtcccggttatgaggtggacgggaatactttacctcaaaatgtaaaactggcctcttcgcccacattcgaaataagttctacctttatccgccaggcgatggaagagggcagggacatgcgttatttcctgcatccggctgtctatgaagcgttgagacaaactaatctgtaaaataaatgaatgacttggaaaatttacaggcgccccacaacttcggtgtatgtgcctctgcctgttgtacgaaacgctttacctgcctgcgctatatagccttgcagaatgcttccctgcaatatccgttcctgcctacgcttactccccggaagctggagtcgatgaaaggaaagtgtgaatattaccgtccgaatacgccggtgcgttatgcccgcggcttcacccgggtggcagagttgctcacggttcgggtggcgggcacattccgcttgcggcttatttcctacttcgggcgtaagaactattaccttgcccgtaaaggagagtaccttatcaatcctgctgcccagcaatacattatcagccaggcagaagctctcggcctgcggcttgatgactactttgacgagtatgtagaacggtatgattggtagggataaccggttgaaatgcaacgcaatgtagtttccacacggtgggaactccggtttccttagggggaaacgtcagtttcctatggtagaaacgtcagtttccccgcagggaaattcaggtttccttaaaggggaacgggcgtttccttaagggaaacatccgtctcctccggtggaaacggaaatgggcttactcaaggcatgcgtcgaggtcgcgtataatctgctctttgtccatgtgctggccgatgaagactatcttttgcatgcggtctccgtatttttcgtcccagtcgcgcatcagtccgggttcttgacgcatcagttcaatcaggtcttcttcgggggctgtggcataccacaggccggcttcggtcagttgtttctgcgtgcctgcctgttcaaaaaggtaggacatgtcgcggttgtggctgaaatagcatacgcctttggcacggatgatgttgcggctccatctggtggcgatgaaatggtcgaatttgtgaatgtcgaatgccggacggcggtagtaaacgaaagtaccgatgccgtattcttccacttcgcccccttcgtgatggtgatgatgatggtgtccgtgctcttcgtggtgatgctcgtgctcttcgtggtgatgttcatgttcttcatgatgatgctcatgcccttcttcgtgatgatgatgtccgtgcgcttctttttcttcctcttcggtggctggtttctctatcccgcgaatccatcctgccgaggtagccacgcgttcgaagtcgaacaggtctgtatggataatcttctttaaatccacatccgcgtaattgcattcgatgatttcggctgcgggttgcagggtacgtataatctgcttgatgcgttccagctcttcgggttttacttccgctgccttgttcagaagaatgatattacagaattcaatctgctggatgataagattttcaatgtcttcctcgtcaatcccttttcgggtgaggtcgttgccgcaggagaactcgtcttgtaggcgcagggcgtccactacggtggtgatgcagtccaggcggcagatgccgtattgggtgtacatgccgcccaggcggggaatggagcagatggtctgtgcgataggttcgggttcgcagatgccgctggcttcgataacgatatagtcgaaacgctccatccgcatgatttcgcctatttgctctatcaggtccgttttcagcgtgcagcagatgcagccgttttgaagcgcaacgaggctttcgtctttcttgcccacgatgccgcccttttggatgaggtccgcgtcaatgtttacctcgcctatgtcattgacgataactgcgaatctgatgccttgtttattggcgagaatatggtttactaacgtcgttttaccgctgcccagataaccggtgaggagcagtacgggaatttcttttgttgtcatatctgttattgttttttatttgctgttattgacgaaccgtacggttgcattcatcaacgcggcattgacgggcagtgaaggattattgtacactgccatttgttgctgcggtgcggtgctttcgcaatctttcagcacatggttcattttgtctatcagaacgagttctgctttgggagatgctttcttcagcagcattgcatcctcttcctttacctgaatatcgtttttgccttgaagaatcagcacgggcattttcagggaagcgatgacggtctgcggattgtatttataccaggagatgaggtagggctgtacggaaggccggaacagcgcctgcagataggcagggacttgcgccacctcttctccgtttcttaacgagcggttgatgtccgccacttctttccgtatggactccggcatcatttgggcagccacttgcttttctatgatttcgtatgccggactgcctgcgccggcaatggaaatgaaactctttactttggggcggctctggcaggcaagcatgccgatgagcgagccttcgctatgtccggccactgtgatgccggtgaagcgtttgtctttggcaagaaagtctatccagcccgtcacatcgtttacataatcctcgaagcggagtttggactcttctttgcctgctgcggcgctgccggctatgccgcgtttgtcgaaacggagcgaggcgatgcctttctgtgccagtccctcggcaaggaatttcagcgaattgtttttcatcatgggattgttgccgtccatgtcggtggggccggaaccggcgataagcagcactacgggacaggttgtggcattggcaggcaggagaagtctgcctttgatgtcaccggtagcggtgcttaatgttacaggactttcttcggatgtgagaggctgcgcctggcagtaaggttggagaaacaggacgcaactgaatagaaggagaagtaatcgtttcatatcatttactttttggtttttggaaaacggaagtaaatgtaaacaatattatcagataaaaaaagaggaaagcatgtcaaaattcggataaatcttacatgcttttctcttattatactgtaacaatcatcctgcttacaggataccttgcgacatcattgccttggctactttcataaatccggcaacgttggcgccctttacgtaatttacgtaaccgtcggcttccgttccgtactgcacgcaagcctcgtggatgttcttcatgatgcttttcagcttttcgtctacttcttcggcgctccagcccagtttaatggagttctgggtcatttcgaggcccgataccgatacaccgccggcattggctgccttgcccggagcatacagaatcttggcttcctggaacactttgatagcttcgggagtagaaggcatgtttgcaccttcggataccgccattacaccgttggcgataagtttcttggcatcgtcaccgttgatttcattctgagtggcagaaggcagggctatgtctgctttttcgccccaaggacgtgcaccttctacatacttaacgcccggatattgctctgcatattcacggatgcgtccacggtagaggttcttgagttccatgatgtaatccagcttttcacggtcgatacctgcggggtcgtatatgtaaccgtcggaatcggacattgtcaggactttgccacccatctccagtactttctcggcagtgtactgagccacgttacccgaaccggaaatcaggcaggtcttgcccttgaggtctgtacctctggttttcagcatttccagcaagaagtagatgttgccgtaacccgtggcttccggacgaatcagcgagccgccgaattcgcggccttttcccgtaaaggttccggtaaactcgtgagccagtttcttgtacatgccgaacatgaaacctacttcgcggccgcctacaccgatgtcaccggcaggaacgtcggtctcgggaccgatgtggcgccacagctccagcatgaaagcctgaacgaaacgcatcacctctgcatttgacttgccgcgcggagagaagtccgaaccgcctttaccgccacccataggcagggtagtcagcgagtttttgaaagtctgttcgaaagcaaggaatttcagaatggagaggttcacggaagcgtggaaacggataccgcctttgtacggaccgatggcgttgttgtgctgtacacggtaacccatgttggtttgtacgttacccttgtcatccacccaagtaacacggaactggtaaacgcgatcggggatgcaaagacgttcaatcagattggctttgtcgaactccggatgtttgttgtactcttcttcaatggtagaaagcacttcttctactgcctgatgatactccggttcattggggaaccgtcttttcaaatcttctaataccttagctgcattcataatctatttcttttattgggtttgcatatttatattgtaaggcggtgatacggtagcgccttacctcttgttgcggttgcaaaagtaaacataaaaatgatacaagcaaacaatttataaataaaatacgggataaaacaacaaaaatattgttttatcccgtaaaaatgaataaaaagatattatttatttccttttgagcgcttttattacaggaatgaataccaatgctgctgaaatgacaagtgtcaggataattggtccgtcaatccgttcggcggttgtcagtactatgtagcaaagcgctgcccaaagaagcgtgatgcaaacgatttgaaatctggaaaattgccttttcatttgcctgctttctttttgtccacaatggcgtcgataacggctactgcggtaatgtttactatatcgcgcacggagctttcaaaatcggtaaagtggataggcttgttcagtcccatctgtatcgggccgatgagttcggagtccatatccatcgactgcaacagtttgtatgcggagttggcggaactcaggttcgggaagataagcgtattcacatcctttcctttcaggcgggtaaacggatacttggcatcgcgcagttcgcggttcatggcaaagttcacctgcatttcgccgtcgatggcaaggtcgggatagttgcgctgcatgtagtccacggcttcgtgcacgcttaccggacttccttccttgtccgtaccgaagttggagtagctcagcatggccataacgggagtatggttgaagaagcgtacggtatactccgacagtttggcgatgtctatcagcgtttccgcattgggatggcggttgataagcgtatcggcaaggaagtacgtgcctttcttggagttgaggatgtgcattgtgccgaagtgcttgaattccggacggatgccgattacttctttggccaccttgatggtgttgctgtacttggtgtacaatccggtgatgaaagcgtcggcctcaccggtttccaccatcatcatgccgaagtagttgcgctcgaacatcttgtcgttggcctcttcgtaggtgacgccttcgcgggcgcgcttttcggaaaggatacgtgcgtaacgttcgcggcgttccgattcgttgggatggcgcaggtttacgatttcaatgccttcgaggctgaggtcgagttcttttgccagcttctcgatagcttcgtcattgcccaatatgatgggatggcagataccttcggccttggcctcaacggcggctttcagcatattggggtgaatgccttcggcaaataccacacgttgcgggttgcggcgggcggtgtcgtagagctggcgggtgagcttgctttcatagcccatcagctcgcgcagttgcaggcggtaggcatcccagtctgcaatgtgcttgcgggccacaccgctgtccatggcggcttttgccacggcgcaggacacttcggtgatgaggcgcgggtctaccggtttcgggatgaagtattccggaccgaaagtgaagttgttcacatggtaggcttcgttcaccacgtcgggtacgggttgtttggcaagattggcgatggcgtgtacggcagcaatcttcatctcttcgttgatggcctttgcctgcgtatcgagtgcgccgcggaagatataggggaagccgataacgttgttaatctggttcggatagtcggaacggccggtagacatcagtacgtccggacgcgctgccatagcgtcttcgtaggatatttccggagtagggttggcaagggcgaatacaatggggtggtcggccatgctgcgtaccatatcctgcgtcagtacattgcctttggaaaggccgaggaatacgtcggcgcctttgatggcttcggcaagggtatgtacgtcgcggcggtcggttgcaaagtaacgcttctgttcggtcaggttctcgcggtcgctggtgatgacgcctttgctgtccagcatcaggatgttctcgcggcgtgcgccgagcgattcgtacagtttggtgcatgaggtggcggaagcgcctgcgccgttcactacgattcttacgttttcaatcttcttgcctgccacttccagtgcgttcagcagtccggcgctggagatgatggccgtaccatgctggtcgtcgtgcatcaccggaatatcaagttcttctttcagccggcgttctatttcaaaacattcgggagccttgatgtcttccaggttgataccgccgaacgtgggggcaattgccttgactgcttcgataaacttgtcggggtctttctcgttcacttcgatatcgaatacatcgatgccggcatagattttgaacagcagcccttttccttccataacgggctttccgctgagtgcgcctatgtcgcccagaccgagaacggcggttccgttggagattacagctaccagattgcctttggctgtatatttatatgcgtcctgcgggttcttctcgatttcgaggcacggttctgcaacgcccggagaataagcgagtgaaaggtcggtttgtgtactgtagggcttggtgggcactacttcaatttttcccggtttgccttgcgagtgatagagcaaggcagcttctttggttatcttagccatggtagattagttaaatttgttatgatttggtcgcaaatttagagataaaagttctaatttgtagtctgtatcggataatttctattagaattatcagtaaataaactaaaaatgcttatttttggcaatagatttaagtattaccccaaattattaacttaacacagttgttttatgaagatttttaaacttcctcttgcaggattattgttttgcaccgcgccgttgctggcaggatgcggaacgagtgacaaacccgaagctccggtttccctgacctgggaaatgggtacgggtaatgcggaacccggatactatgagaactcctttgttcttaaaaacatctccggcgctcctcttccccgaaattggacaatctattattcgcaacttccccgcaatgtgaagcagatagggaatcctgccgttaaggtggaaccggtgaacggaaacttctttaagatgtatccgacggaaagctttactccgttggctcctggtgattccatgcgtatcacttttctgtgctcttacaagatagaccggaattcgcacgcgcccgaaggcacttattgggtggctacggcagacggtaaggaaagcagtccgcttcccgtaacgctgaatacgcttgcgttaccctcgccggagtcactgcccggctatccggatgcaactaaaatatacgaatcgaatcttcgtttggagaacgtatcggctttgaaacagtgggatatattgccgtcggtaaagaaagcgacgcctgccgaaggcgctgttgtgctggatggcaaggtggctttggcgtatccggacgcgtatgccgttgaggcaaggttgctgaaagagaagttatctgctctgtacgacttggaagtagtggataaagctcccgttacgattgctttggaaaccttgactgacaaggcgaaagctgtgaacgatgaatactatgatttggttatagactgcgaccgggtaaagattagcgccgccactccgcacggagttttcaacggtacgcaaactttgctggcgatgctgaaaggtaaagaagcgccgtaccggctggacgctatgtctgtggaagattatcccgaccttctgtatcgcgggcagatgatagacattgcccgcaacttcactaccgtagacaatttgaaaaagctggtggacgttttcgcttcttacaaaatgaatgtgctccatttccatttttcggatgatgaggcatggcgtctggaaattccgggattggaagagctgaccgccgtgggcagccgccgcggacataccaccgacgagagccgttgtctctatccgtgctatgacggcggttacgacccggatgccgcaaccgtaggcaacggatattactcccgtgaggattttatcggtctgttgcgctatgctgccgaaagacatatccgcgtcataccggaaatagaatctcccggacatgcccgtgcggctatcgtctccatgaaagcgcgttataataagtataaggacacggatgtggaaaaggccgccgaatatctgctgagtgagccggaagatacttcccgctacgcatccgtgcagtattatacggacaatgtgataaatgtggccatgccctctacttatcgctttatggagaaagtgattcaggaacttgcggctatgtacagggaagccggcgtaccgctggctacggtgcatcttggcggcgatgaagtggcgcgcggcgtatggctgggttctccaaaatgtcaggcgttgatgaaagagaaaggaatgacgaaaccgcatgatttggcagagcatttcatcacgcagatggcagacattatgcaaaggaacgggctgaaattcagcggttggcaggaagtcgctttagggcataccgaagaggcgcaccggcaattgcggactcaggcggcgggcgtgtactgctggaatacggttccgggatacgatgaggtggtatatcagattgccaataacggctacccggtgattctctgtaatgtgggcaatttctatatggatatggcgtacaacgggcatcccgacgagcgcgggctcgattggggcggttatgtggatgagtcagtctctttctccatgcttcctttcagcatctatcgttcgttgcgtatggacggtgcaggcaattccgtcgatttggatgcagcggaaaagggaaaaacagttctgacggcagaggggcgaaagaatatcctgggtgtgcaaggtcagttgtttgccgaaacaatccgtagctttaacggtgtggaataccttcttttcccgaaaatcatgggactggcagagcgtggctggaatgcttatccggcatgggaagaactgcggggtgcacaggaacagcaagccttcaacaaagcattggcgttgtattatgaaaaaatcagcgatatggaaatgccttattgggcaaggaacggtatcaatttccgcctgcctcatccgggattgttggtgaaggacggtaagctttatgccaacgttgccattcgaggtgctgaaatacgttacacaacggatggttcggaaccggatgcccaatccgctttgtgggaagcgcccgtgccgtgccatgctccggtagtgaaggcaaagaccttctgtcagggtaaggaaagcctgccgataacattgaaaactgaataataatgaaacgcatcatccgttgaggctgaatgtatgattgaacagccctcgacagatgatgcgtttcacttgaacagatgatgcttacgcgttcagcgcctgttctatatctgcgatgatatcatccgcattttcaatacccaccgagaaacggatgaggtcggggcggataccggcttccaacagttgctcgtcagagagctggcggtgcgtatggctggcaggatggagcacgcaggtacgtgcatcggcaacgtgagttacgatagctgccagcttcaacgagtccataaacttgatagacacctcgcggccgcctttcagtccgaaagagataacgccgcaggagccgttgggcatgtacttctgtgccaatgcgtaatacttgttgtcgggcaggccgcaatagttcacccatgccactttgtcgtttttggaaaggtattcggctactttttgggcattgccgcagtgttgcggcatgcgcaggtgcagagtttccagaccgaggttcagcaagaacgcattctgcggagactggatgctgccgaggtcgcgcatcagttgcgccgttgctttagtgatgtaagccagtttgccgaaagcttttgtataagtcagcccgtgatacgattcgtccggtgtgcagagaccggggaatttgtcggcatgtgcttcccagtcgaaattgccgctgtctacaactgctccgcctacgctggtggcgtgtccgtccatgtatttggtagtggagtggactactatatcggctccccattcaaacgggcggcagttgataggagtggggaaagtattgtctacaatcaaaggtacgccgtgcttgtgggcgatacgggcaaacttttcgatgtcgagaacttccagcgtagggttggagattgtttcgccgaacagggctttggtgttcggacggaaagcggcagagatttcctcttcgggcgcatcggggttgacaaacgttacatcgacacccagctttttcattgtcacgccaaacaggttgaacgttccgccatagatagtggatgagcatacgaagtggtcgcctgcctggcagatgttgaagatagcataaaaattcgctgcctgtccgctcgatgtcagcatggcggctacaccgccttcgagggcggctatcttggctgcaacggcatcgttcgtaggattttgcagacgggtgtagaagtaaccgctgtcttcgaggtcgaacagacgcgccatttgctcgctggtatcgtatttgaaagttgtactttgataaatggggagtacgcggggttctccctttttaggagtccaccctgcctgtacgcacagtgtctccggcttgaattgctttgccataatgctatctgtatttagagtttcttttctttaaaacacgtaagttgtcgcaaaagtagggaaaaaaatataattttgtgcgcgcgaatggtaaaatgctataatttagcagttgaaaatctgctgccgatacgaaataaatgacgaataacgggaatatgaaacgtatattttgcttgcttgctgttctcttctgtacttttcttcttttggatgtctctgctcagggagaatatgccacacccaaatcgggcgagggtatttcgtcttttctggaacggaacaaacgtccgggaaaagcctactataatgagtttatgaagctgaacgaaaaacgtctgcgtggaaaagaggaactgcgattgggagtgaaatatgtgttgccgcccttgaagaaagggacttctgcttccgtttcgcccaaagctgttgccggtaaaaagagagtggttcgcgaacggctgttcgggaagaagctggccgatgtgacagtgacgtccaaccgcttgcagggtgcttgcttctatgtggtcagcgggcatggcggtcccgatcccggagctatcggaaaaataggaaaggtggaattgcacgaggatgaatatgcttatgatgttgccttgcgccttgcccgtaacctgatgcaggaaggggcggaagtgcatatcatcattcaggatgccaaagacggaatccgcgacagccgctacctttccaacagtaagcgggaaacgtgcatgggcgatgccattccgctgaatcaggtagcccgcctgcaacagcgttgcaccaaaatcaatgaactctaccggaaagaccgtaggaagtataagtattgccgggctatattcttgcatgtggacagccgcagcaggagtgcgcagacggatgtattcttttaccatgctccgaaaagcgtgtcgggaaagaaactggcggttaccatgaaagaaactttcgaatcgaaatatgacaaacatcagcccaatcgcggatttgaaggaactgtcagttcgcgtaacctctacgtgttgctgcaagccgctccggtttcggtcttcgttgaactgggtaatatccagaatacgttcgaccagcgccgtttcgttatcagctccaaccgccaggctctggcaaagtggatgacggaaggattcattgcggactataagcagatgaagtaggggtgtttgtctgtttcataaggtatggtttctcattccggacataatgaagaatgacgaacccataccttacatattttaatttattctatcggaatatagatttctgtcagtaactcatccggtgcagtatcagccggattattcaggtatcgttcggcactggcttcatccctgaatgtacattccatttcagggatgtattttccatagattgtgtcgtacacactttgcaggtgttcgtacgaacccttatacaggaatatggcatagcgtcctgccggaagttgcttgaagccgatattgcctttcggagttgcggcggcaggcataaccatacatacatcggtacgcagtttctctatcggggtcactttagggtcgtcatgaaaaatacagtaaggcatcacttctcccattggcagcttttcctcttggacaaattgttgaaggcgcatccacgtgccgcaataatcatttagtttatagtctccgaacaatcggatataaatcacatttcggaccggaagttctttgatttcccgtttcagtttgagttccggacggataatagctggtttcataattacaaagtttttattgttacgatattctaaaggtgaaataccgtagaactgcttgaacactttagacaatgacgaggaagacgaataaccgatgcgataagcaatgtcggctatcggcaaatcggtgtagcgcaataaccgtgctgccgtttcagtacgtgtccggacaataaacgtacctatgggttcgcccaaaaaagccttcatgatgcggtggaaatagaatggagagaaatgggaaatcttggccagcgatttcaggtcgatttcttctccgaggtggagattgatataatccaccactgcattcacacacttctgatactcttcccgggttgtcttcttggtttccatatattctatcggtttgttcacgatgcaaaaataaggggaaaaagggataggggacttgtccgatgttgctataaatgtggtttgccgcatatttattggacatttgttggacggaagttcgttaataatcattgtttgtttaatctgaaaagacaaaacatatgtaattttgcagcggattatattatataaatagcttttgaaagagtatatgaaagaagcatttcttactttagggcgtggtgtaggccaggtgatgtttcagaacaatgcgctgtcgggggtattgatgctggcaggtatccttctgaattcctggcaaatggccttgctggcgattgtgggtaatgttgtaagtacactaacggcttgtctttccggttacagtcgcgaagatataaggaacgggctttacgggtttaacggtactttggtgggaatagcgatcggagtatttatgccggtttccgtagcttctttctcattgttggttgcaggtgcgtgcttatccgcttggatagcccgtcttttcagcttgcagcggcgggtgccgggatttaccgctcctttcatcctttcggtgtggatattgttggctgcttgcagagggatgatgccgtctttgctattgccttccgggaatgcagtgacagcccagtcactctcttttttgcaggctttttgtctgaacatcggtcaggtgatgtttcaggggaatacagtattggcaggagtgctcttcctgttgggtatcatggttaattcccgtatcaatggcttttatgctgcattgggagcggggctttccattccgttcgctctgctgttgggagtggatgatgctgttttgaatgccggattgatgggatataacggagtgttgtgcgccattgctttgggagataaaacatggaaaggcggcgcgtgggccacagtggctgtattgctgtccgtcttactccagataggcggtatgaagtggggaataacaaccctcaccgcaccgttcgttgttgctgtatggatagtggcagggtgcagggccggatggaaaaatagaaatagaaactgaaaattgctgaatattacaaagtatgaccgagaaaacccgattgcagctcttggcgtgggcaagagaatatcattgtgcagcctttatacaaggtgatcctgttcagtttccgcatcggtatacgcagaaacaggatattgaggttagcggcttgctcacagctataatgagttttggcaaccgcaggcagatattaaagaaagcggacggactgcatggcttaatgggagcttcaccctaccggtatgtcttgtcctgcaggtggaaagaagatttcctgcctacagataggagtagcttttaccgtatgctttcccatgcggatttttatacttactttgcccggctgcacgctgcctatacccgttttgatagtttggaagatgccttgtcggtttatccgggtacaccgatggagaagctgtgcgcatttctggaagtttcagtcaagagccctcaaaagaaactgaatatgtttctgcggtggatgatacggaaagagtcggaagtggatttcggcatttggaagagctttgaccgtcgcgatttgctgattcctttggatacgcacgtttgcagggtggcttatcttttggggcttaccgatacggaaacattctctctgaagaatgcgcggaacataaccgaggctttggcggaagtctttccggacgacccctgtttgggagatttcgcattgttcggcagcggggtaaacggggtgctgtaagattgggctttggtcttaccagtctatctcctcaatgcctttgctccgtaaataatcgttggccttgctgaagtgcctgcaaccgaagaaaccgtattcggcggaacggggtgaaggatggacggttgtcagaataaaatgcttgctgctgtctatcaaggctgccttttctttggcataagctccccaaagcatgaatacgagatgttcccgttcatcacttaatttcttgattaccgcatctgtgaaagtttcccagcccatgttgcggtgcgaaccggtttcgtgggcgcgtaccgtaaggacagagttcatggagaatactccctgagccacccagcggtccagattgccggaagtaggaatcggtttgcccaagtctcgatgtatctccttgaatatattggcgagtgatcccggtatggctactccttccggtacggaaaagcatatcccgtaatattgtccggggttggggtagggatcttgtcctaagataaccacttttactttttcaaaagggcatgagttgaaaacatgaaagataaggtgtcccggcggcagcacgttggcacgtccgtattcgcttttcacaaatgataccaatctttcaaagtagggcttgtcgaattcttcttgtaaacgttgccgccagctctcttctatcttgactttcataggatactgcatctaaatacgatgcaacaaatgtacaaataatctctgtgggtacgtatgtgttttgcggataaaaaaattccgattcgtcacgaaccggaattttttctttaatgagatttacatttagaaaagactattctttgacaatttcgcctttttcgtttaaaagcgtttccgcttcctgaccgtcttgggtgacgatgatgattttgtagagtgtggtctcttccgtttcttttacgtaggcttcttttacagatgcaccttcataatctttggctaatgtctgcataacagcctgtggcaattctgtcgggtcgattttcacaaattcgtcttgcggaacttgtgcttctgccacgattgctgatgagttgtttacttcctgtgcgaatactacagaacttcctgttcctaaaaccattactaatgctgctaatacctttttcataactttctgatttttagtgaatatttggggttatcatctctaacacttatcataggacaaatagaatgccaaactgtattggctgttggtatatgattgatttacaggataattatgcgaagttgtcccgaaaagtccaatgtagaaatatgtagagtgttgtagaaacgggtaacacatttgaggaataattacacagaatcttaacggacttcttatttattctatataaatttgcgccatacttaaaatagatatgaatatgcttagactgaatgtttttattcaagtgagtgcggataaccgtgctgctgtgatggaagctgcaaaagaactggtagcttgttccctgaaggataacggttgcattgcttatgacatttttgaaagtgcaacccgtgaagatgtccttatgatttgcgaaacatggaaagatgaggagtctttggctgcacacgaaaaggcggcgcattttgtgactttggttcctaaaatacaaagccttgcttctatgaaactggagaaattcagcttctgataataaacaatattatttgaaaaagtcaaccattgcgttgacttttttgttttttacttcatatatggtaaatggtatgaagcaaataatctttatttttgtaatgctaataagttgtctgtcctgtgtcggtaaatcgaccggtcaggcggaaaggagaaacgatatgaagtcaatgaaagaaatttatctggcaggcggatgtttctggggaaccgaacatttcctgaagcaaatagaaggtgtagaagttacccaagtgggatatgcaaacggaaatatagccaatcctacctatcagcaagtctgtacaggtactacggactttgccgaaaccgtaaaagtacagtatgattctgataaggtgaccttgccttttcttatcgacctttatttcaagacaattgaccctaccagtctgaaccgtcagggaaatgaccgtggtactcagtatcgcacaggcatttattataccgatgcagccgatctgcctgttatccgtgaaaccgttagccgtctggctgccaactacacccgcccgctggaagtggaaattgagccgttgaagaatttttatccggcagaagagtatcatcaagattatctggataaaaatccgggcggctactgtcatatcaatcctgcgctattcgacctggcacgtaaagcaaagatgaagaaaccggtggcggcttacagtaagcccgatgatgcaacattgcgttcgcaactcaccgcagaacagtatgccgttacccagaaaaatgccaccgaaccgcctttccgtaatgcctactgggatgaacaccgtccgggcatctatgtggatattactacgggtgagcctttgttcgtctctaccgataagttcgattccggttgcggatggcccagtttctccaagccgattgaccgcaagctgattcaggagaaagcagatactactcacggaatggtacgtacggaagtccgtagcaaaacaggtgatgcccatttgggacatgtctttacagatggtcctgccgataaaggcggattgcgttattgcatcaacagcgcctctttgcgctttatccctaaagagaagatgcaggcagaaggatatggtgaatatttagaactggtaaaataacacacaatggacatattattaataagtaataaggatgcgtgccgcagccgtatcgcacaagaactcctgcacacatttggcagaggaatgaatatttctacggcaggagttatggaaggaaattgcgttcccgatgtcgtatgcgatgtgatggagcaaaacggttacggcatatcgcgtaaaaagccttccggtgtcggagcatatgcgcatcggtcatgggactatgttgttaccctgtgtaaagaagctgaggaagaactgagcttcctcaccctcaatgccaaacggcaggtgcattttaactttgaagacccttttaaaaatcgttttcaaagcgagagtgaacaggaacaacaaatagaaaccctctatgaaacaatgtatcggcaactgtacgagttctatcgcgatgagttgagcgagcaactattgccccgttgtacgtgcggtgcaaatacttattgccgttgcgaatagtagattgcttacgctattcaatctttgtccgaatatcatgttcttccgggattcttctttttttagtaaaggggagcggtatttataagtatgatttaattataaatatccggatataaaatagtcaatgccttataaaggtttgtttcttttacaatagtctcctctttattatcaagtttgattcccggttctttctggcatagatacgttctcatgctttggccttcttttgtatggaaattatctaaagccatatcaatgtatccccaataattatttaagggatgattggatgcactgcgtatactgtttatacgtgatttccaattaggatgattggtaaaagtaatgcggttgttcctaatgtcttcaatcaggcacactgcctggataatactactagttaatatttcttttaaatcgatgtttagtgtattgtcgaatagtttgtctaaacaataaagcctcattttcgtagtatttgtcaggctattgtctttttgccaatcttccgtttttttgtgcctgtatcctaactcccataatagaagtagaaactccggatgatatattcttcctacttccagccctgtttgtaacttgtgaagtgtattgggggcgtgtatggcatctctaatttcattagcttcctcttttatcagtaggttgagtatggaagaagagtgtttgtgatcagcgaggtaaaacaatgcctcaaggaattcttcgtggggaaatgtatgccatagtgtattgattttctcttcagcagtagcaccggctatgtgatgatatccccaaaccggacgttctttctctatacttatgcttaatgtttccaacatatctgacagttcggttttatgaaagagggagatggccgtttggtaagggtcgggctgttcgtcttctaagaaacggacagccggtacttgcaattgaggatagagcagctttaatattttgtattctttaggtttcttccatgctatgatttcatttttatctaatttgttgtgttttcttaggaatgactctgctttgtaaacctcttcccatttaccgctttgtttgagtgctgcctcacaaaatatccaatgatttttgtaatgggttattgcgttattagcgatacatacccatacattggtttgaaaactgaaatactcgggtttgttggaaagtaatgcttcaatcgtataaattgttcctgaaaggtccactccggaagtaattagagttgttattagttcagcttgcccttcctgatacaatttgaatgctaacctggagaaagtagcataatatttataggtgtcggtggggaactgctctttcatgatttttctatcttcataagtaatttgataaccacattcgagcaattttattaagtcctggacactgtaagggtagttgtttatgaattcttggattatgctgtgtccgtttttcttttcacaaggcagctccgactggaatatgtttttattgttagttgaattatccatcgtttatataatttgaatttgctgtttaatgagtgtaaaagtataaaaataaagcgtttatattctttattgcggcatttatttttcatgatgtacggaatgtttggagagcagatattaaataatgtgttatttgctctcaaaagagctgataatctgccgactgatatatatggggcttttaagaaggtgtgtcgtaatgcacgatgcaccttctttcttgtttatcaccgatataaatcggtttattttcttcaagctgcgataattcgaagatttctttgatttatgtgtctccagcatctaaataaagcgacagtaagctcataaaaccatcctatcagccagttcataccttcttttgtcagttttgcacacatcttttttatattgaaggcaatggctaggaaggcaaagtccatgaagaccttgtcctttccaaaatgtcggaaacgtttgtagttcatattgtttttaatttgtccgaacacggcttccggttctatgcatctctgccctctgtgtttcagtcctttctctgagcagagcagttctttggctctccgcttgtattgtctaagcctatgattcagttctatcgtcctgtttccttttgctttaaaacagcggcatcgcaggggacagccttcacacctgacagctctgtaccgtgcattttcgctgacatatccggatgcggttttcacattcctggtgcctatcctccgcatcctttgccccataggacagatgcagaagtcatgttcttcattgtagtagaagttttcggccttgaacgggtccggtttgaatctcggccgctgctccatgtggaaatagttgtactttacgtaggcttccatgccgttttcggacatgaagcggtaattctcttcggagccatagccggaatcagcaaccaccgtatgggccatccggtcatacctgtttgaaaaagattgcaggaaaggaatcagggtcagtgtatccgtagggttcgggaagagtgcaaaatcggtgatgaactgattttcggtgccgatttgaaggttgtaaccgggcttcgtctgtccgttgcgcatggcatcctccttcattctcataaaagtagcgtccttgtccgtcttggaataggaattcctctcttgcagtgtttccagatggcagtcgtattcctgcagtttgtccctgtgttcttccagttccttcagctgtttgcgtttctttttcagttcagtcttttcctctttcgcggatggctcggaaacctgttccaatgcatgacgcaattctcctgccatttcagtcagcatggccggagtgaactcaacctcctcattgttctctgatgacttctcccgggcaatgacatcgtctatctgccctaacaggacatgtatcttcttcatcaggcgttcacggttccgctcaaccgtttttcgccagacgaaagtgtacttgttggctttggattcgatctttgtcccgtcaatgtattccacattcaggctgatgaagcctttggaagagagaagaagtacggtttgcgtaaacacctcgttgatttccttcttcacccggttgcggaaacggttgatggtaatgaaatccggtttctcatatccggccagccagatataatggatgtcacggtgaagaagcttttcaattttccggcaggagtagatgttgttcatataggcatacagaatgaccttgagcatcatcttggggtggtaagggctgcggccgcattccttatacagctttctgaaactttcaagattcaagccctcaaccagggcgtcaaccatgcgcaccggatcgttttctgcaatatcctcatcaattctttgaggaaaaagaacggtttggttgggaatgtaaggacgaaaatgtatctttgtcatagtgaaattcttatgcctaaagatacagaatctttaggtaataacaaagccccagcttgtgaaagtcggggctttgtacgtaaaataatgaaggtgtgcattttgacacaccttcactcttgtattttaatccctcatgttttgagggcaggcattgtcaatcgtcgatatcgattactctcatttgagagtcgaatgtaatttcccaacgattggacaattttatctcatattcattatgatcgaattctatttcgagaattcttgcatccggatagttggtctttacataattacggattgcttccggtacaacttgtgcgggaacttcactttgtctgcaccgcacttccttccactctcccgctttatcgaattctactttttctccatttgtaaagactacatcataacttttgtagaatactcccgattccattttggctaatgtcactttatggtttttgaaataagtcttgataaatgtctgcgcttttgtcggtaactggtttacctgtatcggtttatcgttatctgccattaccattgtgtgcactgcaaacatacaaactaacatcataataaactttttcatacttctttatttttaatgattaatactttatttgttttcgtattgcaaagatgggaaaggaatctggaaagaattgggaaaaacagaaaaaagtctgattttttatttgggtgtttgttttgtgcttttgtaatcaagaatgcttattctttatttgtaaatatttgtttgaaataaatattactttatttttgcaggtggtttattgcgagccacatctgtaccgagataatgaagctccctgaaacaccttcatagatgatgaataatgatatagaagcagtttgttatgacaatgaaaatattaaataggtttatagatgactgtgtgaatgtttttcaatatcggttcatggacacctttcaatactttaaagaaaggaacaagaataaatatttgggagacaggtttgaagagtgggttgtgaaaaattctaatatcagtaaagatggatgttccgacttggatacaggaaaaatattctggcggcttctggattggcgaggtgataaatatgttgagggatatcggcctctgtcttcttcatctccggatttgttattggaatgtgctgtagataggagcaggatttataaggtcggagagataatagccgtagaatgtaaatggagaagtaaagttggattttatcttgacaggaaggatattgagaagtacgaggtatatatgaatattaaccaactgaaccgtccgataaaaagtctgttttacgtttttggctttggatgggttaatggtgctccggagcacgtttatgtggttcctgcacgggaattatacgattataacaaggacaccggtcaggtaacgtttcctgccaaagaaggtgaaagcgagaagctggaacggttgaagcgttttaaaaagaaggataatagatgtttgatgtatatagagtaacctttatttaatttatttcctgctattttcttccatgacactcaatgcaaattttatgatgaagaggagcaccactcctattacggcatacatcgacaatatgaataaggaaaacattaccgggaaatagattacacataccgatagaagacgtttaccgctctgccgtagcgcggtaacgaactggatgaattgaatgacaaccataataacggcatataccagtgaaagtgccgtcataaagtgccagaagccgaagtcgaaacatagtgctccccatatattattcttgggaaacatatccagcggactgctgaatgggattttgataatcatcactaccaatggaacaagaatagcgtataaggaatagcttaaatccataggcactgctttacgtcctatccaggacagcacattcttgaacaatataaactcttgatatacgacaaacatgcttcccagaagtatcagcgccatatttcccagattattttctactaattgaagcgatgatagcatccctgcccgtgagtgaatcatccaggcgaaaatacacacggtcatggagagaagggtagcaagtgatattctgttgaatgctttccacgaaagatattcaccattcgaaaaatgtgctgtaaaattcagtaccgttgccagaattgtcagggcagaaagtgttgccggaaagatatactgtgagtcaatcatagttaaaaggatttggtaaggtcattaacgaaaaatccttgaatttcattgaaattcaaggattacatcatttttaaaagtggtgccaccaggaatcgaaccggggacacaaggattttcagtcctttgctctaccaactgagctatggcaccatttttatctcttttgcggttgcaaaggtagtgaaagttttggactatgcaagaggttaggaaataaaaaacgctgataattctctatatagttaattatcagcgtatatttttttagaagagtatggaataaatccgttatttatgccttcttcttttattttattcttgaggttttgtcattttcggatttctatttgatatcctctttttcccggttttggggcattttgtctattcaacctcttcctgctgagcggcagattcctctttaagcggattccagccttgtgccttcagttcaaattcctgtccgtcgcggctgatgagggcgcatcccagttccggtttagtgatatggcctatcaacttaatgccttccatttcggaaaccttttcatggtcggcgatgggcacggtgaacagcagttcgtaatcctcgccgccgttgagggcgcaagttgttaggttcatgttgaactcctctgccatgacggccgtttggtagtcgatgggaatatgctcctcatagatgcggcaaccgaccttgctttgcgtgcagatatgcagtaattccgaggataggccgtcggaaacatccatcatggaagtaggctgaataccttctttagccaacttctgaataatgtcgcggcgggcttccggtttcagttgccgttccagcagatactctttgccagcgaaatcaggttgtaaatctttgtcaccccctttaaggacgctcttctcacgttccagcagttgcaagcccatataggctgcacctaaatcgccggaaacacagataaggtcagtctctttggcgccgttgcgataaacgacctttcctttctcaccttcaccgatacaagtgatgctgattgtgagtcccgtataggaagaagaggtatcaccgcctacaatatccactccatattcctcacaggcaaggcggatgccggcatacaactcctccatatcctctacgctgaaacgtttggacagtcccagcgaaacggtgatttgccggggtgtaccgttcatggcatatatatcggaaaaatttactacggccgatttatatcccaaatgtttcaaaggtacatacgtcaaatcgaaatgtacgccttccagtaacaaatcggtggttaccagcacttctttgtccgccgggtaggagaggacggcggcatcatccccgatgccgtaccggcttgattcgttttttaattcgatactctcggtcaggtggcggatgaggccgaactcaccgagagttgctatttctgttctcatcttaattagttgaaaggttaaagttgatagttaaaagcgaatagttaccgcgtacttacactgcacggcaactttcaactcccgactatcaactttcaaccatttatttacttacgctctgttaatcaactccctcataatctccgtcatcttcggctgtgcggcatccgcagctttctgcacttcttcgtgggaaacctctacaatcttgccttccacgcctaagtccgtgataaccgatacgccgaacactttgataccacagtggttcgctacgattacttcgggaacggtagacatacctaccgcatccgcacccaggatacggaacatcttgtattccgccggagtttcaaacgtaggcccttgcgtgccgatgtacacaccgtgctgcaccttgatacccttttcagtggcaattgcatccgccttgcggataagctctttatcgtacgcctcgctcatgtccgggaagcgcgggccatacggaatattcctgccgtgcagcggatgttcggggaagaaattgatgtgatcggtgataatcatcaggtcgccgatttcaaaatcgggattcgtaccgccgctggcattagaaacaaacaaggtcttgatacccagttcccgcattacacgtaccgggaaggtcacttccttcatggaatatccctcatagaagtggaagcgtccttgcatggccataatatccttattacccagcttgccgaaaatcagtttgccgctgtgtccctctaccgtagaaacggggaagttgggaatatcctcatactttatttcatacttctcggtaatctcacctgcaaggctgccaagtccggttccgaggataattgctgtctcaggatgcgtgtgcatcttacctttcagataagctgcggtttcttgaatacgttctaacatagccaataatgttttggttaaatatatattgttgattttgtaaaaactctatttcgatgggaagcacataaatgtacggcttcagtgtttcgttcaggttgggatggttcttcagtcgggtagcatctttctctgtcgtgataatcagcctgttgtttcccttcaacaggttaaattgtttctcgatgacctgcaagtctttctcgccgaagtcatggtggtcgccgaactccagcagattgacgctgggggtgtaggatttcacttcttccaccagtggggcgggagaggcgatgcccgtaacgagtagcacctgttcgtctccggtgcaggtaattctgccttttgccttttcggggaacagtggcatcagcgagccatagcggaatctggagaaatacagttgctggtacggatacagattcaacctcttggtgatgatgttgaaatctatcggcttgatatcatccggacactttgttacaatgactatctgggcgcggtttttcccgcaggcgggttcgcgcagtcttccggcaggcaacagggcgtcgtcacacagcaaccggtgatagtcggtcagcaggatattcattcctgcctttacatggcgatgttggaaggcatcgtccagtaacactgcatccacggcaggactcttcaatgtaagcaactgctcgatgccgtgacagcggttttcatctaccgctacccgtatatctggaaacttgctctttatctgatagggttcatcgccgattttctgtacgctgctttcggcggttgccagtatgtaacctttgctcttccgtttgtatccgcggctcagtgtggctacgtttatgccctcattctgcaataactttatcagatactccgtatgcggcgttttgcccgttccacctacggcgatgttgcctacacatatcacaggaacgtcaaaactccttgaccggagccagccccagtcaaagagtttgtttcgcaagcacacccctgccccgtagagccaggacaagggatatagccaatgatgtatttttacggatgcatctttcatttaaatttattgtatgttcagttcaaacggtacgcgtgcctgtatgcggtctatcttgtcaaagttctcgatgatgctgaactgacggtacatatcgctcattttgccgttcagcatgcgccccttgatataatttccgggattcgtattcatcaggctttccaggaaaccctctttcttgggataactcattacggtgtaagcgtctacacctgcttttgcaatggcaatctccaacgccttgtccaggccgcccaattcgtccaccagtcccagttctttggcggtgcttccggtccatacacgaccttgcgctatcttgtccagttcttccatactgatgccgcgtccgtcggagcagcgggtcaggaagagttcgtagccgttgttgacgtacatctgcatcaatcccttttcaccgtcgttcatggggcgggtcaggttgccgaagtcggcatacgggttggtctttactacgtcgaagttcacacccagtttctccgtcagccctttggcgttgggcatcattccgaagataccgatagagccggtcagtgtggtaggttcggcaacgatggtatcggcattgcaggagatgtagtaaccgcccgatgcggcataatcgcccatggatacgattaccggtttctcctttttcagttggtttacggcgtaccatatctgttcggaaccgtatgcgctgccgcccggagagttcacacgcagcactacggcttttacattttcgttatctttcagcttacgcaggtctttgataaccttttcggagttgataccctcgtcggtagaggcggacgaaccgccgtcaatctcaccatacgcataatatacggcaattacgtttccgctcttgtctctgggcacgttctttttcacgtttatcatgtcctgaatgcccagtatcggcatgttgtcgtccttgtcgatgcctgccaggtttttcaggtagtcgcgtacatcattcttatatattaaggtgtccaccagtccgttcttcacgctttcctctgcggggtaaaacatcagcatgcggtcggcttccttgttcaatgcctctacggacaggttgcgcgattcggcaacggcgttcgtaatctgtccccagatggacgacaggtatacatttatctgctcgcggttggctgcactcatttcggtggagataaacggctctactgccgatttgtatgtacccactttaaacacctgcatctccacgcccactttctccaataaatctttgaagaacataggagtagctgccagtccccgccattcgagcataccttgcgggttcagcaggactttatcggccacgctggacaggtagtataacccctgcgtgtaggcatcaccgtaggctacgacaaacttacccgattccttgaagtctttcagagcattgcgaatctcttccagcgaggcgaaccccgctcccagtgaagtagcctgaatataaatacctttgatatcctcgttctctttcgctttcttaatggaagagagaatatcgtccagaccgtatgtcttgtaatcatccttcataataaggtccagtggattttcctggctacgttcggccagtgtaccgttcaagtccagcatcatgacggagttcttacgtacttgcgtttccgattccgaggatgaaaccatactgaaaactacgagaatactgatgaaaaacaacacaacgctcgatataacaataccggttacggtggcgagtgtaaatttcaagaaatctttcattgtcttattgtttttgggtatgctaacttttcaagctaacaaagataaataattaggttgatattttccctatctgtcgcatgaattttcagtttgtcacatggggggcttttattctgcatttttaccgggggatataaataaaaagagtctgccgctttttttgtgcgacagcctcctttatgtagagaatgcagtgaagaattctttctccttatatttaagagagagaattctttgttataggtttctcgctttccgcttcaacaaatgagataagaatatcttttattttttcttttcccccgataggttctattgtctttctttctataacgacctgatacgttttattaaatgcaatattataagccatttgtcgccttgtttcatccaaaaaaccgatagatttaaagtcatctccttcggccgattcaaaggcatagtttcctgttctgatgttgattgaatagaatctgccgcacagtctgatttcttccttgttatcaaattcaaaatcggataggttagctaatattttttttgtatcatgggtgctgatatcctgtttgtatgaagtcttagagttggcattgtaccatttgattcctactgccagactttcttcgtttaagaaagaaacaaagtcattgtactttttcagaatatttttgtcgtataatccggaaaagtccaggatgctcttcttatcatatcctgccttgaataattgtattaaatcttgtgcgaaatcatcagaatatgtcgtactgaaagatgtttgctgattaatcggtttcaatatgattctgatagagccggcaagcgagtacatatattcatattgtgtatctaaacgtaattctctatctatattttgcttggcatttctctctaaataggtatttgagtgttttactcttttaataaacttggacgacatcgactttctgatatcctctattttgggtattatcggagcaaacttgttcaaggggatgctgccgtatttcacatctttcccgctgatatgtatttctaatattccggaagagtatttctgggaaatagcagctaaatcaatagtgtcttcgatttcaaaggcatagtaagaattttccgttggagtgtattcttctggcaagttggcaatcggcacaagtttaatgttatgataatgtatcttatcatcaatatctacggtgtatacaaatccgtcattaggttgtgttattatggaatgtagcgtacttttcttttctaaatactgttgtattgaaaaaatatcggttctgataacgacccacctgttatattcattatctacatccacccagtagaataagtagttttctcccttgttgcttacgtaatgagacaataaaggcccatcatagtaaatcaagtcagcaactttaataagtttactgaaatcaaaattgatactgaaaccgtttattgtcttcatattagtatttttataatcttaaatttatcggataaatcacattcgcaatattcgtataagtcaaaatggctttcattattggcttgcgtaattaaaccgtcttctttgtttagcgttccgttgcataaagcatctcccatagtgcgggctatattcctcatattggcttttagtgcattgtacttttgaatggctttatccttttgttcaaaacaggataatgcatatcctgacgtatttattcttttcttgtccgtatctgaaattatccgttgcgggttttgtatatataccggtttgtggttattgggatttatctctctaaaaacgtatctgtaggcatctttgttttggggttcggataaaggcggaagtttggctccttcattgattaagacatctatttccgactgatatttgaaagctgcattcgccatgtttaacacatttttagtgtcgcaaagatagggaatattttttagcagaagggtttatcggatattttcttttccaaacatgttttttatcataagaataaagtgatcaggtcctttaataaaataataagctgtatacttccttggcatttaaaacaatcccccctctcatttgttgctaaaacaatttttttattcattattttagtaacaagttctgtgtttaggtgcaaaatgtgtacttttacgcaggcagtaatgcttaattggtaaatgaacttacaaaacaagaagaaaaagttgagtattcgtgttgtcatacatccttgtaaagcgagcgcagcgggagtctactcccttgcgattcgcgtgctgtactgccgtaagaagaaagaatactctttggggtggcgggtccacgagtcgaattaccggcgggatgccgaccgggtggtttattcgtccgagggtatcctcacccgtagggaagtgagcctcgtcaaccgtcttatcaggaacgagaaagaagaccttgtcaggaactaccgtctgctggagagaaccgctcccggctttacgctggagcgcctcatgctgaaacaccggaaggagcagtacgaccagagtgtggataaattcatcctgcaatacatcgataccctgctcgaagagggtaagcaaagcactgccgcttcctacacaagcgggctgtactcgctgttgcgcttttgcagtttgaggaaaatcaacttcaaagacattgactatgtgttcgtcacggactatatacactacctgcgcatgcgcggcatttcggagaacagcatccacatgtacctcagcaatttccgggcggtgtacaataaagcacgcaagcaaggcatcagggtatgtggcgaaaatccctttgccgggctgaacgtgcgcaggcaggaaacggtgaaacgggcgttgagcaaggaagagatagcgctcatcgcttcggccgacctgcggcggtatccccagttggaagcggcgcgcgacctgttcatgttcagtttctactgccggggcatgtccttcgtcgatgtaatccacctcaagcacgacggcattgtgcgcgacacgatattctacacccgcagcaaaaccgggcaacggttgcagataggactgctgccagccatgaaggagattattgaaaaatacaggacatctggcccgtacatttttccttatatccacgggcagtcaccgcgagatgcctacacgcaataccgctactctttgggcacggtcaaccgttacctcaaacgcttgggcacattgctcaacataggcattccgcttaccacttatgtggcgcggcactcgtgggccaccatagccaagaatgaaggtatcccgatatccttaatcagtgagggactgggacatacgtccgaaaagacaacccaaatctacctgaattcctttgcggtcgatactctgaacaaggtcaatgaaaacgtggcggatgccgtatcggattgtattaaaaatgcaggtgaaaaattcatctgtctacataacacagataaaacctaaaaaacgactcaaataaaccgaacttttctacttgctttcactatatatactttgtccctgttctttgatgttgcaaaggtaaaggatatttttggatattgcgttatccaaatccatcaatcagttatccaaattaaccaatctgttatccaaaattacaaaatgctgaatatcagtgtttatttttgctgctttttttaatttcctgccttaattcgctgggtgagcagccgaaattgttcttgcaatacttgttgaaaccggctgcggaggtgaagcccaactcgtatgccacctcttttatagagatgaaatcgtaattgagtcgggatagtatttccttgtttttttgtttctgaagccaggattgaacggtttctccaaactcttgcgtgaacttgcggtgaagttcggaaccactcatgcccaacaattctgccagctcttgtttgctgcgcacccggtctttgtgtttgagaacggctgccttgaagtctatctcaattcccattatagggtagaggagttggattatttcgctctttgtgtaggctgtgcggaagatgatgaacaattcgcgctctttgagttcgtgcaggtgcttgcagttgacgcccgcctggagataggactccagcagatgcaggaacgtgtccaaaggggcacgcacggaaagcggttcgaagcatagtggtgtgtgctggacttcgtctaaatagctgctaagcatgtgcttgtcgcacagcgagattgcatcgtgaaagaatgacagactgatgtatgtgcccggctggataaccgtgcccgtgtaatgggatgaaaggggaatgaagatgaattcgcccgcacggactcttgtttcttccttgctgtctttggtgatgctgacttcgcctgacaaaataaatatcaggtggttggccttaatctcttgttgccggttgtcgaaatgttttcccgaagcagcttctttcagtgcgaaaccggcgtcttcctcggtcttgtagttcacgcatgaggtgtgttctttaatgtagttcagcttcattttatgtactcgatttaaagttaataatttcgttgttttatcgccatgtttcattttttgtttcagaaaaacggatgtatcgaagcaaaggcttgattgtcattttgtcatttataacggcatgttgagtttcttttgttggtgtttaaaggggaaactcttcattactgcgtgtattttaaggatagaatggtatcagaccgaagtcccgatacatccttgtttttctttttgtttcaggaaaatcgttcatgccgggtagcattgaaacggttttccttttttaattacttgattactaatgaaatgcacattaataatctgttttatgtaaacagatgaaatttctaaaaacagcaaaaggaaaattaacctctataaacaggtaaaagattacgaataaaaacgaaagagaatgaggggagtggcaggaggaacggttaccgaagcgggtgtgagtggaaacatatacccgtatgtacgttataatgatacggaagccattgtgctggacgcgaagaatgttagtacggatagatattttcgctgtatccgcgaccttgattgaaactgtaggttttgttttgttgtccgtggcggttggaaaaagtaaaagtattcggctggtattgataataaggcttttgcctggactttagaattggaattagaatgataacgaaattaatagaacccgaaaacagtccctatgttatgaataaaaaaggtttgtcccgactttgttcgtgtttttgtttgtttgcacacagagggatatgctacggaatcgcttgcggaggcgtcttgtttttagcgattttcgtagccgttttcggttttcctgtatgggtgtcggagctcttcgagaagcggatggaggcacgtaggaaaaagagtagtgacagaagtattgataatcttgacaattggtagttttaataattgataacccgtaatgaagaatcctaaaaaagaaccccgtgatgtcatagccaagcacgtccgttggaccgaagcattgcgcgtagtgcgcgcttaccaccccgaagtaaccattatcctgccccaggagaaaactcagatttatcccggcgacgatgtgcggggaatgattgcccctgccgtcggcgtcattcgccatgcactcgatgcaggagtgtggcagtggcacggatacactgccgagtcgcgtgtgaagcaggtacgcaccctgctcagccattacttccattatcacgaggatagcatccatccggcagaactcgacctgatgattgaagatttgctgtttgtgcataaagtctgaggagaatttcctgaataagatttgcttcaatattattttaaagtaaaattcgacttatgcgtacttgacacctatacatccaccattagcatacaaaaacaaaatagaatgtctgaaacaggctggtcattctgaaaaagaagcgcgacagttagctttagaacctatagagttagaattatattgtgaaactggcatggcttatttgccgttcccagacaaaggacaataagcaaagacacctcctccttaatacctcacaagtaccattacacttggttaaagatataggatttatcgaggcagcagttatgcctcggtatatcctattcaaaacaccgtagattgctcatccaagtcagatgctaccggtcaaaaaatcaaacagtaaaaacggcaaagagattataagtataaaaccgcacagcaccgatacgagcgtacacgaaaaaatacctttaaaaaacatcaaacagaattgcttcaaccgtctcatttccagttatccaattttaaacgttaatattatttttgtcacttcattgcaagataaccgataatccgttctaaaggtgcatccttcaacaaaaccctcttctcaccgtccaataaataaagcgtaggtatcgcacggatatcataaagtccacggctaatatcaccactcctgttccacccgactatccaaccggaaggcatggaagaagcgtgcaacaaccactcggactcatcatcctccgagtaaatggcaagtacgcgaagacttcccttctcttgcagttcaacaatggaaggaacacccgacagcgtcagctcataagcatggcagctcgaacaacccggattgtagaaaaaaagaagcgtataatcggcactgatacggctgagactgcccgtcgtacaggaagcagtgacataagagaagtccgcagccttcatcccgggacgattcttaagacattgttcgaggtggtatccggcacgaagcttataagtctcgcccggaagcggggaggcaagcatatgctccagcaccgggatgtaatattcatcattcctcaaaggagaatcgggattgtagagatacttctcacccagtgtacagaagcgggcgtaagcgacgctgtcagtttccataagagacatcatggcaagtatcgcagaacgagactctgacacgtcaacatattgcagcgcgtcgacaaagttagcatatagctgctcgctctcactgccacggataaaagacgtatccgacaaggagtaaccatcccaataatgattcacataataagaagcccgctgaaccgggtcaagcatcatgtcggggataaccggggagacataatgctctacaaccgccgagtcccgatccgcagactgacgatccacggcgccttcgttgggatacacctgcttgcaggcaaggaatagtaacagaaaaagcatgcctataaacgtgaccgtcaagaaactggaagcaacaacagtggttaaataagggtcatgcttatgcacccagcactccaaacgcatacaaaggatatccaatagccggtccttcaatttaattatcttcattacgatatagtatataaaatcaattcatacgggcataaggataagcatcgacaaccaacgatacgggaaacacatacagagaatcatcgccatccggttcaggaattatcacagccggaaaatactcacccgcatccagggcgggaacggagatgatgatacgggtatccgaatacgtgtaaacagggttcagttctatgacacggacatactccagcgcagaaacgaggcaaaaacgggcattatcaagcataggcatacaaagatgatgaccggaaatgacgacaggagcctgcggagtcacgtgtccgtcgcaacgccggctcaagggatcgtatatccccgttatctcaggaatgacaagacagttcacatgcagtaattcgttatttattatcttcataagattattcgcattagtgttaaaagcgaatgcccgagtgtttcgcaacaccacacggcattcataaattgagatgtaaaataaaaggtctaatgaccttatgacgggattattactaaattatcagtacctctgtcagtacctttaccattgcctatttattataacccattcatcatgaaatggtacccgttagtactcgcttgcactaacgagtgccagcaaacaaacaaaaataaaagctatcttcacagacaaccagagtttttctacggaaatctgccagcgggagcaaaaagcaaccgggtatcatacagaacaagtcctatctgctcattgatatataatgccataccagccagtttccgagtaataagcattcagttcgggagaagcggctcgaggtatataaaccgaaagaccgctatggactttcagttcgctgcccagcatctgcggggtagcggcacggtacacaacggtacgttccatggcccgctgggcaacggcatactgttccgcatcctccgacttcagccggagataatcccccaagtccgagtagaggtaagtagccccgctgctgcggtcgtagcgttcagtctggtaaggcgacacctcctttctgttaaggaggataggccgcaatgcctcggcaagcacgcccatctcagaggtacgtatcacgctgatggtagcagaccggtcaagacccgtcaagccgttgtaatgattataatagaggcgggcgaagcccggaaggtcgggttgcgggagaaaaaggcaatcccgcagttcatcgtagatatccgtaaagccgggcgatagcatctcagctgcagaggccaccacataatcggtcttctcgcgcagttcccaggcaacttcaacgccggccataaagcacgcctcgaaaacgataaagtcaaagtggcagtcgcctaaggcggcagcaaagtcgcttatctccatctcattgttcccgtctgcgacaatgctgcgggagtggggatacatgccttggggaagccacccggtaccatggctgaaaacaaccaggccgtagctctttgcaggataacgggaaagcatgtcaacaatcgtacgccgaagagtagaaccggatgctgaattctcgtctggataggtttttaccctctcaatcccctcccgagttacctcatacaaacagggagctccccctttgtcctgataaataataagacggcagtcggaacggtcccaacccgaagcaagagcatgtatcttcgcgtccgtctcggaagacaagttgttatcaccgcccatataaaccagcacggtacggtgataaaaggcaggagcctcagaaggagcttcctccatgcaggcgccaagcagaaacaggcctaagggaattattcttttcattttcattcttttacgcaacgggcttgggaaagagcggttttagatgtcgggttgttagcccaaccatccactcaaggagcaacacgttccggattatttttagtacgttccgtacaagttcatatacctaattattgaaaatagcctctttgggagcaacgtcataaatctggcgggactccagtgctccaccctcgtcaaaaaccatgtagtggatagccttaatttcattttccggctttccgctccttgtacgcaattgcaaagtagggtccagcgatatccgcagtgagataccggaggtgtagccgtcggttatattgtcctcgcaactggtgcaggacaatataaccgttatggcaaacaacttgcaaaattgaataaaactaattttcacaatattctcttacctactaaagccgtaatatcccatcaagaatagttttttcaccgtagcaggagctaaaaccttatcccaggcaaaaaactccataagctgcccttcgaatccgggaaaactactgccgttgttacccaaaataaagttggataaagaagcaggcgcatcgctgaaagtagcattctgcacctcttcgccattcatatagactacgcatttactaccgtcataagtcacgacatagtgtatccagtcgtgtagcgaacggacctggtcggcattcagcaacaatccgggcacagccttcagtttcttattctggtaagaaggctcagttacaaattcagtgatacccgcgcaatgctgcacattagcataatacttgaaacccacgaaaggcgtggaagccaggccactattaccaagaaccgtttgtatattctcatccatacttcccgtacgtttcagcatgaaagagaaagaccatttgttgccggaagcagaatttcggaggcttatatggctgtctcttccaaactgggctgcctggcgcgacatctccttgccgttaatgtcagttagccccgaaacactaaccatcgagataccactggatgatacaacccgagccttaccggattctggtatcgtcgaagtagtgaaaggaaaatacgttatcaaagagcttttaatatcctcgtcatcgagtgtcccaccatatttattcgcatctgccggtgtcattgcgggtaaaaaacgttttcccgtggcataagagccattgggcaacgccccgttctcctccatacactctgccacggcaggtgcgatgattttacggaaagtattttggccgaaatgcgcatcgcctcctcctaaagccgtgggattgactggcacaccgtaaggaacatgtacaaaaccgtccggattccattgtttatagctgctgaacacaacggaagcatctttcccaccataccagtccataaaaccacgtgtcgaagagtatgtgtaccacaagcgcttgtcaaatgtaccataattggtgcgtgcaccgtatcccccgctattcatctccgtaaagatgtggtctgtcatttttataaactccgtgtaatggtggtcggcgttgaatcggtcatgctctccttggcaccatacgaatcccaggaatttattggcagtattcaggtccagtgcatacttcagcctatccagcaaagtcttacaataggaactctccactccccagcggtatagcacttttgcggtgattacaggcttcatctccttatggtcataagtaccgtacggacgggctgccttaaacccggtggctgagcaggatacggggacaaccagaattttcgtaccggaaggcaggcgtttgaggagttctttcgccaatggcaaatgaatgcccttatagttacgtccgtaaccgtaggttgcgtcatctatgtcctcagcgtcaaaagtcagcggaataatgctcatattagggatatttcccctgccataagacaactggaaaatatcgggatgcaccacatcctctgggccggccaccgaaacgtcatagccggaagcgttggactgaccggcaaccactaatactatataacggttttcttgtgacgacgcctccttttgtgtcagcgtgaaagtccttgctgacccgctgatccggttaaaaatcaagatttcacccgtgcgggcactcgcttccatattcaccttagcttccactgtaaaagatccgtcaatagaagaagctcttgtctctgctaccttttccagccacccacctgtaaggatgatatcacattcggcattacttttcacatcgaagcggataagtcctcccgtctcctcgataacaaaggtagaatcagcttccgtataaatacctgtagacgggctgatgtccacacttacaatggggcggtcgtccgaaacggtagcattgatgtcgtcacccaccagccatggacgtacatccatggtagtcaccaacgtattggctttcacctcgttcacaagaatagaataccgatagttgcgctgcaaaggtatcagcttcttttcctgtgccaaaaacacggtataagtcagcggaattccgttcacatcgccggtaatttctactgcggtagccttcagcgaatccgtagacgcattttcataggtgtacaaccgtatggttccatcctttgcctcaatagattcaaaatctttgctgccactctcgacaaacggttcaccggaaaaaataaccgacgagctcatcgcacggataagcttggctgacaagggtacgaacttctccgatttattctgaatgtcgatacgggctaccgcacgatagagcgggcacaatacagaagtttgcatagtcccgaacacgatgtcgtcgctaatgccgtacatcacaaaaggagaggcaggcatctcctcaagaacagacgtacggaacgcaagcatatcctcagtagtggtacggtctatttcaagggcctctaaccaggaagtattatccccgtttgccaccacatacaccttacggggcccctcggtatccatactgatatccacagatgcgtaaccctcaggcgaggtgccgaaagaagtaatgttcaatagtttcttttcaagtttgccggccttgaaaatcagaaggtcgacacgccttacgtcgtcttccccgctatcggctctcgtcaccgcttgtgtgacattaaacaagagctggctatggtactttccatccgaaacagaaacaccggaagtatattcgtcgctgcaaccggacagtaacaatatcacaaaagttgctacccacaaagagatatgatagtttggtctcatctttaattatgcttctaattggttattatttccagtccggagtagattctacaatttcttcggtccaaggtaccacttcccagtaaaagttgcccgtgaaattctgttcctggtcgttaagactgttgataaccacattataacgggtagccttctttatttctttcaagtcgatatcaaaaacggcacgaatgccattgtacttgccatatacggatagaaccagactggagctatgataaagatagataggattggaggtatatttctggtcgatatggggaagttcatctgctgcaagtgattcattaaaagcgtatgtgcctaatgtagcattacgcacaatcatcgagtcgatttcaaatcccttatagttattgactatgtcaaggcgtgaaaccgtatgcgtaaactctaccggcaaattggttgtcaaatacggagtatccaattggactttggacaccaaagtaaatggagcctgcggaatattagagtccataaggagggcttcctcatcaacggatgtagcaggagtaccggggcgcatatcagtaagaaaaggaatgttggacacattgttggctacgaaatagaggatacgcggcaaagtgccgtccaacgttaggctcaattctgcttttgcattcccgccggaagtaaccgtttcagtaaaccttttctcataagtataaacagtttcacccggcttttgaacaaaactgaatatatttactgtgtttatcctgttttcgtccgtttcagaagcataactcgtaatacctcgcacactaaggggcaacacaatcttcgaagataatatgtcattggtatcatccactatcgagctatcactgccacaagcctgaagtagcgaaccgacaaatagcagaaacagtaaatattttgtaaacataatataatatttttaatttattagctgaaagcaatttgtgtagcaacagcaatctcctgctgctacacaaattatttaatcacaatattattcttatcttttcacacaacgtacatatgccgtagtatttaccccgtgtgtaacagtattctttgcccagccatcatagaaaggtgcaacacggtaatagtctgctgtggtacccggtactaactctccagtccatattgcaaatcctctttgagtactagttgctggcacagtatgactaccactaggttggttaaaatgagctcctataaatggcaattctgtttcgaagttggtgccttgtataaagttccaataccagcccctaagttccgcaggaacagtaatagtaggataactaaaacctgactgcaccaaggttaccccattcgaaaaagtagtattcttagcccattttgaattatcattaggaactacagtaagacctgccaatgcagcgtaatcagccaaattagcaatacgataaccagcagggcatgcgttcattgcacctatcgcagtaaagaatttaccagcaattttttcataatttgccttacttttttgtacatacaggtgtaatttgtcaataccatttgctccttctgctgcgtccgcctgtgttaagatagctgttgcagtttcttcatctgttgcaagagatccggatgtattgaatggcatccatctattgccacctatctcaaccaatagtttttcaagatttgactccatcggggtaaaatccacttcgaatccattgtcatcctgaccccattcatcaatagttacattccaatcgaacgaaggctctccactctccaccatcggagtaattgtcaaaatatagtttttacctgctacaggagaaaatacaacacctctttcgctaccatcaggagcggtaattctcactgctacatctgttgacggatagatatagtgtgtagtctcagtaccattatacatatccgcagcattaccagtcaaagttctttcactaggagcagagattacagcaaaactagcacctgtccctccattgaaaagataactatttctaagatagttagcaacactaactttataatctttaagatcacttaggttataaccggcagcaacagtcgctcccaaacgtgaagcgcgacgcgtcagattaagtgatggcgcttgtatagtacctccctgtagggtaagttccttgataccagaagcaggaatcccatcagtcaagtcgtaatccaaggtcgtatttgccaatacattcttgaatgcattttccgttgtcccggctgttcttataggagagtttacataaagatatagtttggctacttctccggctgtaaacttgtcagccgaaatttttgcagtaaacttagaaccttcaaatttcgggtctgtcaactcaatttcagcacctccgtttttcttaaacaacttagcagaaccttgcaggattgccccttctttagttgttgtagaataagtcgtctttccaccaccaaggtcaatactgatcaatgcgtcaccgggagcaaggctcgcaccggaattaagttcgtctatctcatttgagcaagagaaaaaggatacggcagccaacgaagctgcaaataaatttcttactttcattttactttttactttttaaaattttaatactttactttctttttacagagagactggataatctgattaaacggtctccccctacttagatttaaacatttctataccataatcaaaataattttaattagttaatactaaaattacaactacaactctgttcttctttcttaaaacctgaaaacaatcatcctacccaatggaaccgccatcctcccaatctgatatcgaaatattagagattacaaccgtgttatcgtcaacctcgataagaagctggtaaaactgcacacgcgtatgggtcaggtctatatgctgttcctcaaaatacttgttcaaaggcaggtccttgccgacaagaagcgtttcaccgtcgtaaagacggagcacaggagcgcgaccgctctcccaacgcaggccgtacatctcgaaactgtactcgttcgaaacggcagtaggctgcagccttgtcgagtaagtagccaactcctcggtaatacgcggcgtattgtaagggataccatacaggttatccaccttctcatcattcaggaagccgaattcaaccggcacatattcaaggcgtacgtgcagattctcaccggatttagcaaagaaatccatcggttttttccatcggacagtggcgctcagccatatatgcacattcgacatgtctactgcctgtgcatgttcggtatacccgccctttaccgtcagggacaccttgccgaaataaaggcggtcggaattgccgacccgctggctatcgtcagagcttgaggcgtacgtccccgtataagtgggagggttgacaacacgaaccgacagttcccgcaggctcgtcttacccaccacatagtcgcttaccttgctacctccgttcaggttggcatagctatacacaatccaatcaccgtcaggaagattgataggacgtttagtgatacgtccaccggttatctgttcgtccacccggtaaagaaccgagtctttcgtaaagatgaagtcggtaacctcattcagataaagagaactcgcgtcctcacccacattgttcagataacggtattctatataattaagcacacatttgtcctcatcgatgatagagcagccggacaaaagacaaattgcggaaagcagatagccggaaagcttgaataaaccaccctgtttcattgtttcgtatatttatcaaagagggcgttgtcacgctctttgcgagttagttctgagttattatgttccacttcctcgggcgacaaaccggaggatgacgcttctttcagatggcgggaggcctgttcaaggtcgccttccagcaggtacagcacacccaagttgttttgtgcgcgagggtcatccttgacacgcgaaaggtacttcgatgcggaaagcgtgtcaccgcgcagcaaggcaaccgcacccgcgttgatattcgcaacgggatcttccggaaaaacacggacagcgacatcaaaaacatccttgaactcctcactgccaatctcatagctgttggcaacatggtacatctcgttaaggctcaactgacccggacgggtttttataacctcgcggccctgttccaccgtaaagtcctttaccgaataactcagctggtaatctgtgcgacgaagcagcggaaacagctcggtcagcatacggcggtaagggacacccttgccaacagatttaaaaagctgttcccggcggtcaggattgctattctccgcaataatatccaaaaactgctgtttctgcgcaaggtccgaatcacggataagcgcctcaagcgtatcccagtcctcaggaacggaagaagtctcaacacggacgcccttaaggccgtagctggcttccagatagttcttcagggcaacagagcgagcggcagccaaccgggcgttcaaagcgtacgacccctccggtgaggaataagccttaagtacgataaggtcaaccgtcgacattgagtcggcaaggacactggtaatcatggagccgatcttgtccaattctatctggttattcttatatgcaggaagtatagtcgacttgccgcttaaaaactcaaggcgggcatttccgctttccacacgacgtttaatgggttcagcttcaggaacgacaaaattcgagcgcggacggaccacgtaacggtgtgcaggcaggtcaaactccagagaatccgcaatggtactaattgtaccgggagcgttcttaccgcagcagtcgcaaacgctcttcaagacaagacgggagtttttcatccacgaggccagcggaagccgctcgttgtacaaatacccgccggaagacaccggattgacggaaaccgcagaattgcgggacatcgctttgcccccaagcagcgcctcgcggtaagcaaccctggaacgcttcttaccatccacaaccaatggattgaattcataagcattaccaaaatcatccgtcaacatcggaattatagtcacacggtccatgccgccgatatccatgccggaggtcgagagtctcatattcatcagaaggctgtcctccacggtgcctttaaaggtcacgtcagtcacacgcaaaccgttcagcgagagcgtgtcgggcaccgactggcacagggccagtgcgggcgagacaagggaacacacacacaatgatactatagaacatacttttttcataagcaataacatttactttttattcgattatatagatcagcgacacggcgagcttggtaggacccaaatagttggacttattgttacccgtgaatttaccgcagttacggcactcgtaacggtcgtatttaaagtaggtataacctactcccagctccgcttccaccgcccatcggcttctgaagacccattgataaccataccccactccaaaaccataaaggttgccacgataacgatatttagccagggtgttttccgtcaaaccgaatggaaggtcgatagcaccggcattataattgccccaatgcgcatgggcgccaaagaaatgaccgttaaaacgctcacaaagccaatatcggatttcgggctggatcagaatatgctggattttactgtttgtattcttattaaaaacccacgggttcaagttacccgaaatatccaaggtcagcttacgcgacaaacctatctcagctcctatattcatcgtacttgtggcatcataaagcaaattcgttttcaatgcgacatcctgagcccgggctgatacagcaactatgcttagcaaaaaaagaaatgataccagttgttttctcatactaaaaactattattttattaatatagattatcaatcacagcaacagttcagacacaggcggtgtcggacaatgacgggactacatccgaaggcagtgtaagcttgacatagttatcaccaaggagcgtgcagtacaacagaagcgagtatttagctacaagcgcctcggtgaggcgaacacgacggaaccacaaaccggactctccgaaaaccgccttcatcaccgggccacggacctcaggaacgagatgctggagattcactgccgactgctcgtacacatcccagaacccgttgccggaagaagggagcagataaacatggtaaatattttccgattccagacataatatttgttcaagatatttttccatataaaaaactgtttttaatgttacattttttccctcgcacacacgccacaaagcccataagccgttttcagttgttactctctattttggagagtaacaactattcttattaactgatttacaatatattgcaagaataacacgtttccatgtgaaaaataacactgtatataaagaggtgatattcactaaacggttgtattatacatatttaatatataagatgcagaaacaaatgcagaaacattctaaaaaacagatgactatgaaactactccatgttgaagaacacatttcatgcagccactacatgccgagtggagaagcggggttcaggtatattgaaatgtcgcagtggacttttctggaccatgagatcgcaagctacaactatctgattttcgtgatggcgggaagcctggaaatttcaggagagacatttacaagagaaaaggtacgcgggggagagtttttcttcgttgtgaaaaacagttgctgcagcgggaggatactggaagacgcgaatgtgatggtatgcaagtacgaccacttgaaaaacctgtgcgacaagtttaccttcatgaagctggcaagcttcaagaaggagagattcgagttcgcgccgctgcctgttaaagaggtgctggcaaaatttctggaactgatgaccatatacctgcaggcgggagggaactgcgtgcacctgcatgcaatcaagcaggaggagttgctatgggtattgagggcgacctacgagaaagaggagcttgccgccctgttctaccccgtcatcgggaggtcgctgaacttccgcgacaaggtgatgtcgaactataagagcgccgggaccgcgcagcagctggcaaggttgtgtggatactcaaggcagcagttcaacaagctgttcatggtagaattcggggagccgcccttcctctggatgcagaaacgccttatgctgcacatcaaaaccaggctggctgacggggacatcccgctcggagacatcgtcgaggagttcgggctgtcgtcattgtctcattttataaggctgtgcaaaaaacacttcggaaagactcctgcagaactgagggtagaactggttgaagaacagttaaatccatataaatttaaggttttatagcgcaaaagtcacattggtaactataacagtcacattagtatcagcaatatggggattattccgtagttttgcaacgtcattcagaagagaggaaaaagtgactgtctaaagcacaagatttttcccttattatcctacgacactctccaaaatagagatgaacatacagacatgcaacaaatgtagcaaaaaaaacactaaaaatcatagaagtaagtcagaatatttataggcaactcaccaatttattggcatcatcaatgacggaactgtcaaaatccttaagatagatacgcgtcagacgctcggaactatgccccataccttcactgataatagctatggggattcctttttgtttggcaatattggcccatgaatgccttgctacataactggtcagattgacgcctaatgacaactgctgagctatctgtttcaagttacgattcaatcgcacatacgcgttcttataagatttatatagatcataaggagtgtcgccttctatcataccaaacacataaatactatcagagctatatctatccataattttctgtatttgctcagttacctcaacctgcaaaggtcttccggttttactacgtttatatgaaataatcccctcttttatatcctcatgcttcagctttacaatatccacaaatgacattccacgcgtataaaagctaaacatgaaaacatctctcgctagggcaaagtgcggcttatccgttaaatccgttttaactatctgtctcatctcatcacaattcagagctcttttggcagtttttacctgcttcagatgtaaagagtaaaacggactattcgaggcgcatttcacacccttattcagcgctttattataaatcgcatgtaaattatgtatataatagttcaccgtattatcactgacgccattggccttcaacttatcacagtactctactatcataccctgcgtcatattagcaaacaagatatcccgttcactaaaattcttccgtagcgaatttaatgtccattgataagaattcgacgtacatattttcccattagtatgcaacctcgctatttcatactcaaagaacttatagagatatttcacttgctgcccctcattataatagctcaaaacatctttaacggtatattcccgcttttcagattcaagcaagattactttttctaatatttcagatttaatatcctttgcttttgtatttgcatcttttacctgcctggtggttagtgttcctttaggagaatagacaaccttttcctgttcagaattaaaacagtcgcttttcaccccgtacccgacataaatcacgcgttttcgacgcttatgaagaatttgaactactaaaggaaatcctccggatttatactcccttcctttctccaatataatttttactgatgccatatctttattttttttaatgcaataattaaaatctattactcaatagttcaaaagattgcaaaattataaattagaaacgaattataaattcaaaatcataaaaccggtcaattaacgagttatattataaaaaagatgagtctatgattatattttcaacaattttaaactcccacttcccataccacacatcagaaccaacatccaccaagacaagaaagtcatattgataacttaaacagccaaatatgcaactacagaaaaacaaaacatactacctttgcagcgaaatctcttcttaaggggttatacagttttcattccttaaagtaaaacgtaatttaaccgaattatttatgcgcatctcaaaagtgatttttatttgctgttttcttctgccgttcttggcttcttgcatccgggacgaaatagaagacaatagttatccgttagccgaatatgacggcacgggtgttttgtttcgcttaaaggcagaggcttttgacgatacgggttccgctacccgcaccctggatttgactgcatctttcgatactctttgtgcctatgttctcaaagagggccaaattgatatcgaccgtgaagttaaattccccgatcctgcaacaattatggtggaagggctcgaaaccggcacctacaaccttcttatattagccatgaaaggtaactataaagaggatggagcccggatacataaaatagagaaaagttcctcaccgtggctgtcttttcctgaaaatacgccggcgaagcctctgaaagcccaatattattatacgaatcacaagttctcggtaataaacggaaaaatcaagatagaggaaatacgcattccccaagctgtagggctggtttcttttgatatacaatacaaaagcgattatgtgcgcaaatcggttcacgactgtcattttattccttcggaagacagcaggagctattctgccctgcatgcagacggcagccattcggggcagcgaagcatagcatccttctctttatcggaacaaaaacagtgcttatttttccctaccataaaggatggtttttccggtcaagtagtagtaaatacaatcaatcaccgaaaggaaagttttgacacggagtatgatacaaaggcaaccttagatgccgccaggcattctaccatacatgtgcaggctgtacatccggaagacaatgtgggtactaaccttgccgatgagctcactcctctaaattattatacgattctaagtgatgaagaacctgcttcagtctataccaatgcaaatcagcggtcatttcgtataacccaacctttgcagataaatatggagaacgatagtttgcacatgagattttactctcccgtaggcataaaagaggttacagtcatggcaaaaagtccgactatggatgaatatgtggagttcgtttacattgacaacattccggcatttgccgacattaagacatcgataaaggtattggagaaaggattataccgcactgaatcagggaaaattcaacaactttcagcagaagaggtgaatccggcttccttgagttttaagatagcttgcaacgacccgtattggactaagatttctcagataaaagcgaaatggtacatcaaattcgtacttaatggaggaaatcccgtaacaggaactcccaacaagaactggtggggaatacgccctgtacattgcagggaagctgttgcactctatttgaatatcggatatatgtgtacgctggaaaagttccagcagcgggtttcgacgttccaaggaaaacttcttgacaataacaggtatccagttgacacatcaacgcttatatccagactggaaaacctttccggattcgacatcggacttgtatatagtggcaatggtgtagcaggattaggtgggggcagaacatggggagtctatcagaaatctttcctttatcattacgaaaacagcggcggatgttgttccactatttttcacgaattaggtcattgtttaggctacagccataatagcactatgacatacggacagtgggcttcgggatgtgccgatgtgttctacaagaataacataaaagattttcctgtcaattcccacacaatattaaaatcaagaagtaatcccaatatctactaataattatgaaacatttgtctgttattatatctgtattattttcaatactttgcatcggatgctctaaggaggattttgatactggaaaaacaaatgatattcagaatgagcattctctccggcttttggtctatacaccgacttcggaaactgtttatagtacggaactgccaggaaacatagaggcttatctgttcaaagagggagttctgtccgacgtttacaaaaatctgacagtggataagaacggatacactacaatcagctcgttagccgaaggagagcaaatctatttctttgtaaacaccggtaatctgctgaatgggattacacaggaaataggccgattgaaagaggccgaactgcttgccactacaatatcctcttcctctcctcaagcaaatggagagaaaccggtgatgactggaaaggcagacttaaccggaagccaagaaagtaccacccaagtattgcttacacgggccattgccagagtagacttaaacatagctgacgatgccgacatacaaatcaataggataagtatggataacatacattgtgaagcattcctgcttccgcaaaacccggtcagttcgccgtccggtgcagcattggcaaaaatagatactacattcaatactccattggagccgggtgaatatgctggattagtctacctgtatgaacaagtgggggacggtattcctgtggagctgcatggcacccttgaaggagatcctgtcacactttcactggcactgcctaacacaatccatagaaaccacatttataaaataaagttatttagcggagacagtgccaatttgcaggcaagcatatccgtggaaaatgaaagttgggaagtcgaagaaactatcacggcaaaaccttctaccaatattctggttaatagtgaactttctactttgtctgaaggggcatatttaagtgcaacaaaagatacggtttacctcccgagcaaggagtcaacgtcaatacttgtactggataaggtgccggaagatgcagaattcacaattgatggtacgacagcctccattactccgtatacagaaactcgtgccgaccttcaagggaaaaagttcttggtacgcacttcttggaaaaaaccgggtactgaggcagaatatgtgtacctgaatatgcacagcaagaagcacccggggcactacagtggccggttggtaattgtccagtccaatgccacgaccttcaagggagaattgtataatcatcttacaaacacccctccatataacattcatttcaataaatatgtcgacagtgctttaggccagatagaggtacctaagaactatgaggttagtgtcagtggtggcagttggttaagggcgataccccaaggagacggagtttatgaaattcaggcaggctacaagcctaacgatccggaagccaatggtagcactcaggagggtttgctcaccgtgaacggcccgaatggcatacatgaaacatacaccgttacccggttgaatcacggcttgcctgttgtccttatgggtgatacttactggtgtcgtttcaacttacaaggaaactcaaagagtttcgacgaccagataaccgtcagtgaatctgaaacaataggtgatctgtctgcctattttgcctcttgttctgacgaggattttgtacgtttaaccggcagccagtacaaagggcgctatacgcagggaatgaatttaaagtatgacgcatccgtcccgcgtttctatttcgattcgtatgagtcgctccagaatccggcaatcatagggaatggatcggtaagcagccattgtccggaaggataccagcttcctacttcgagagattttgagcttttgttaaaatcgggggctattaactacacgcttaatggcgcaccggtaaattacacaacgggtagtggaagaccggccgttatttcagcccatagccgagaaaatatagcgtgggaaggaggtctccttgcaacagccaattacatccaaattgcttttgacgaaaacaatctggtcttgggaggattcggtcaccaatttgattcttcaaaatcaattgctgcaaaggtattgtgggcaaccataagtggagggcaccaaagctggactcatacagggactacagccaaggcagaagaccataatgtaaacaaatcccgtacaattcgctgcattaagacgtcaccggcttttataatagaagaataattcggtgttgatttttggtggctttttcttagtatgattggggaatttgagcagagtgacgctgtgctgcctggcggtagcggcaggttatgtccaggaagtggcgagaacggatacactgccgagtcgcgtgtgaagcaggtatgtatcctgctcagccattatttccactatcaagaggatagcatccatccggcagaattcgacctggtggttgaagatttgctgtttatgtctacgggttaatgtagaaggctatgatgagaacagaattaacgataatagatttaattaattgaaaacatacttttgttgcgcttgaaatacaaaacaaaataaagcctgtctcagctaaatcagaatttagaggcgatggcaaaacaactctatgattattggtttgtgcagtttgattttcccaacgaggagggcaagccgtataaatcaagcgggggtgaaatgctttggaatgagaagttaaaacgtaagattcctgttggctggcattgtgggaatctctttgaaattgctgtttttacaaatggtttggcttgtcagaaattcagaccaaaggataatgaagtaccattacctgtcatcaagatacgagaaatgcacgatggtatttctgttgacactgaaaaggtaacgtcaaatataccagaatcagtaaaggtgtataatggtgatgtgctattttcatggtcggcatcactggaagttatgctctgggcttatgggcttggaggacttaatcagcacatctttaaggttacatctgcaaatgatttcccgaagtcattctactattttcaacttttggattatgtcgatgtattcaagaaaatggcagaagcaaggaaaacaacgatgggacatattacgcaagaccatttacaacaaagcacaatcgccatacctgataataaagatattgcggataaattcgaggaattaatatcacctattttcaggcagataatcaagttgcaagaggaaatctcaaatctgactaagcagcgtgatgaacttctaccacttctgatgaatggtcaggtatcggtaaattctgatttagcagtctcttatattatatataaagacataaatatcagaattatgaaagaaaacatcattcaggcgatagttgcggaaatgcagcgtgacttggattgccgacaaatggcacggcttaaagctgtgcttacatcagaactgcataatgtagaaatcattgaaaagagcgattgtgccacacagcaaacgcaggagaatgaacttcttcttaactcttttatatcagccaaaaagatagagggatgttcagataagacattaacttactaccgtaataccattgaacggttgttagtcacgctttcattggcaatttgtcacattacgacaacagatattcgtacttatctatccgattatcaagaagaacaccaatcgagcaaagtgaccattgacaatatgcgacgcatcttttccagcttctttgcatggttggaagatgaagattatatcgctaaaagcccggtaagacgcattcacaaagttaagacagattcacttgtaaaagaggtgctttctgacgaacagttggagcaacttcgagatagttgcacgaccaaacgagaccttgctattatagactttctttcatccacgggcatccgtgtgggtgagttggtcaaactgagccgtgaagatatagatttccacgaacggcagtgcgtggtgttcggaaaaggtaacaaagaacgtgtcgtttacttcaacgcccgtaccaaactacatttgcaacaatatcttaatgagcgaacagacagcaatccagccttatttgtttccctcaattcgccacactcacgactgactatcagcggtgtggaagttagaatcagaaaaatggggcaagccctttctatgccaaaagttcatcctcataagttccgtcgtacccttgcaacaatggctatcgacaaaggtatgcccatcgaacaggtgcagcgattacttggtcatgtacgcatagataccacactacattatgctattgtgaatcaaaacaatgtaaagttagctcataagaagtatttgggataataaccgtgctgatttctgctttaaaatttgtacttttgcagtctaatatggaacgctaataaaagcactatggacttgcagagaatcaataaacataagcaatcgtttgatgacatttgccattatatcgaagacgataatggagcggataaaatagaagtatggtttgcgagagaattgcagattatattggggtatgcaagatgggagaattttcaagtagcattgactcgcgctgttgaatcatgtaaaacgcagaatatcaacatagacgaccattttcgtgaggtcacgaaaatggttactttgggtagcggggctaagcgtgaaatacaagatttcatgctgactcgttatgcgtgctatcttgtcgcacagaatggcgaccctaagaaagaagaaatagcttttgcacaaggttattttgccgtacaaactcgacgcgcagaacttattgcggagcatatagaacaattgtcgcgacttgaaacaagagatcgtctgcgttcttccgaaaaacaattatcacgtaatatttatgagcgcggagtggatgataaaggttttggacgcattcgttctaaaggtgatggtgtgttattcggtgggcatacaacagaagatatgaagaaccggcttggcattaaatcgacacgcccattagcagattttcttccaactcttacaattgcagcaaaaaaccttgccacagaaatgacaaattacaatgtcgaacaaaaagacctttatggtgagcatagtataactaccgaacatatggataacaaccgcagcatccgacaaatgctcggtcagcgaggcatacgcccggaagaactgccagcagctgaggacatcaagaaggtagaacgacgcgttgcttccaatgaaaagaaaattgagaaatcttcttcaaaactcccaaaacttaaacctgaagacaactaatgaataagttatcatcaatcgcatattatgtaactgataaaataagtagtaatgatatttctttatccgaatacgttactacagattgtattttacaaaataaaaaaggacgagaggttgcatctaatcttccgccacagccttgttgtctcactcgctaccaacgtggcgatatattaatagcaaatatcagaccatatctcaaaaaggtttggtttgcagatatagatggtggagcctcttctgacgtgttggtttttagagctaaagagggacattcaccaagttttctttatgccgtactacttcaagattctttttttgactatgtaatgcaaggagccaaaggaagtaaaatgcctcgtggagataaagagcaaattctaagatacgaaatgccaatactttcttgttcggaggaaagcattggcacatttttcttgaatcttgaccaaaaaatcagactcaatgagcagataaatcagaatttaccgacacttgaccgttcattaagagcggtagaagttcgtcacgctgcttagtgagatgtatcatttcctgcgtgtttttctttatctgcctcattattggactaactttatcacagaataaagagataattcccttatttgccacacacaacattgtattttctatatcagaagcaataattgacttgaaaacagacccgcttccttttgttttaagactttcaattaattgaatagtcaagaagtataagtattcatactcttcattttttgatttaagagcgtagcaagattggttcattgccattggagttcctactataactaatttacctatagatcctcttgcagttatgataatagtgttctcttcaaataaagaagaggaacagtgttgcaaaccgctttctgtaatcttatctactgtttgtaattggaacattgaaccattataatcagttggaccaaagaaaggaatatgtccgtaattccaatattcattaatccgtttacttggtgttccaccacttaaaatatcagcaatcaaacatatgttatcagaatgccagttctttggtatctcacgtttcaacttctcattccaaaccatcttaccaccacttgacttatacggttttccgttttcatccggaaaatcaaactgtacaaaccaataatcataaagttgttttgccatcgcctctaaattctgatttagctgacgattaagttctattttgaggtcaatagtgcgaagtaacttacctatgcgtttttgttcctccaattcgggaatccatacaatgcaatctttgattttatcaggtgatgtatgccggattttagtttgttgagcagcagcacttagctgctgtttaacaagatttgaggatataagataaaaagcgaaatccttgtctaacaaatgttctttgcaaacaatttttgccacatcttggctttgaatatatttaccgctttcgggaatgatagcggtagagccaagcaacccaatagcctgttctgtcaaaggtgttataatgtctccctctttcagtaaaaaatccggtttgaagtcgccaatgtaataaagattgtctttagccttattctctttaaagcaattattttggtaatcgaaattcccgcaagtcaagcgcacatattcacccttagcggcatagaactcgccactgagactcgcacctcttgttacatcaagtatctctcctaatttgtattttttcaattccatttaccgtgttgcttttttaatataatcttgaatcaaagatagattgacctctatctctttgtgcttagctaaaaggtggttcagatactctttcgcctcaaacatttttcgtgctcatgtatttgctctattaacggtccgccaataaatggggatgaacagtttctacggcaaattttgcatcctctatttgccgctataaacatgtcaagcaaatgtcgaatagctttaatttgttcctgtgcatctttcgacgaactgcgggcaacacgtaatgcaacgattatagctattacactaattatagggcttaatagagtagcccattgggtcaaactatcaagcatggtttattgattgaatttcaatgtctttaattgagctattatctcattttcaagccgatggctttcggcaaactgctcggtgagtgttttttcgtagtctgccatacgcctcttgaactcctcttctgtaatatcaacatattcaatcttaatgtcgaaatactgtccggcagaaaagctataccctttttctgccacttcttcgtaggatggagtaacagagaattgctctaccaccttctcgtttcggaaaatatctacaatctgcgctatctcatcggaacggagattcgtcttttggttcttccctattttgatagtctcaccaagtttgctcgcatcaataaatacaggcttttcggtcttgttcttatcgataaaaaccacactgacattcgtacccgtgttagcgaagacattactcggcatacttaccacacctttcagaatcttattgtccacaaggtgtttgcgaattttgaacgcaatgccactcttggctgtaatgaatccggtaggtacaacgatagctcccttacccgtgtctttcaagctgtatagcaaatgttgaaaaaagcagaggtatatttccatccccttcttgtctttgttgggtatattgggaatgcctgcaaagaaacgtccgcgataatggtcggctttgaggtcggaatggtactcggagaaatcgagcttgaaaggcggattactaacgatatagtcaaatttacgcaattcgtgtccttctttatgataagggtgtttcagcgtattgccttgtataacgtgcgtcaaagaatggctcatactgttcagtataagattcagcatcaacatagtagaggatttgtcgctgatatcctgcgtgaacaccgtgcagttctgctctccaatttggtgggcaagggcaatgacaagcgtgcctgtcccggctgacgggtcatagcaagttacacttttaacatcctcgctctcatcgacgagtagttgcgccataatggatgcgattgcatggggcgtatagtattcggcatagttgccgccaccattggaattgtagtccttaataaggtattcaaagatggtggagaagaaatcatatccggcagcaaaagccgcttcaaaagaaaaacttgccacatctccgattaacgacttgcaaaagccgtttttcttggcagaccctccggttactacctccgagagaggtttcataatggaaatacgggtttcatcctcattgagaatatagaaaatctcctcattggtatcggcaatagcctccaatgtcgcatcaaacagagttgcaaaattatcctcattctgacgtttggcaagatacggtatcagatgctctttcttcaatacaatagtgtcgagcatcatatcgcacatttcctcgtactcctcatcgggcaatcgctccaatgcttcgtagacgtcctctgcatcggcaagttcgggcagtgtccgttttgcttcatagataaacttatcattgagaaacttatataggaatgtttctacgataaccgtatattcatttccgctgttgccaagaccaatattgtttgtcgtacttttcagacggtcaataaggtcttttgtctgttgctttatgatgtcaatactcataatcagtatatggtttgatattctttgaaaataacgtcactgacatatttacgagccgggcgttccgtggaaatctgcgcatccttaaaacggcgggtgacgtaagttaatatatttttcgtgaagtaagccggagtttcaacaatcgcttcgttgtggaagaatgcatcgtctacatcttcttttataagaagcaagacagccgttacctgctctttcttttttgtccaagcataggtgcgaggttcggtatgctcccgttcctctctgtccgattgctcggtcaaacgtttttcgacacgcacgaactttgtgtcaccgttataggcaatagcccgcaacgcatcacgctcattcatttggcgaatacgtttcagtatgccgttaatgttctgaacgcggtcgtgcatattaaattctccctccgattccatttcttttttcttgaaaagagcaagaaagtcagcgagtatagaacgatattccgggtcatcaggatcaacgcaagcattcaattggttacgagtgtgagctaccgattgtttgtattgctcttgaagttcaagttcttcttcacctttcttatagaacgaaaaatgtatattctccaaagcagcattcagtaattgtttcacgctttcgcggtcatttgagttttgctcatacgagaggaggtcaagacgattgcgtgccgctttgataagatttgatatttcgggtatatcaacaatgtctttcgcttccgggctttcctgcgagatcagcatattctgcatactgcgcagtgtttctaaacttttattgatgactcggacagtggcaatgtcatccaccaaattgagttgccgagaaaagatttgaggattagtcaagtcatagtctgtcaaagtaacttttgcatttgcaacatttttcattgcttcctcaatggtaacaaatagcttatccattgaagatgtattttcttgaccaacttctttttcaagctcttcttgataatccttgttcgtcttactgtattcttcctcgatattggcaaagtctactacatgcccgaatttcatagccttgtacggacgattgacacgtgtaagcgtttgcagcaggttatgttccttgaccatacggtgcaggtacaatttcttcaatcgtggagcatcaaagccggtttgtagcatttggaaaacaatgagcaagtcaattttcccgtctttgaataaatcaatccatttggaacgggtagatttgtcaaaactgtcatgcaagataagcgcagcgcgataacgtcctttttgcggtgaagtcttcttgacctccatttcatttgccgaaatactacggtaaattatttgtccgtcttcacctgtataattgtcaagttcagaatcatctgcatagttttccaaaaacagccgatacatcattatcgcctgttctttactgttgcatacggcaagtgctcccaatgatgggtcagaatacttgcttcggaaatcctgcaaatcattgattatatagtcgagtaaaggatgtacatagttctcgtgggcataaacatcaatttctttaacagtttgcttttttacccttatgctgttaagggcttctttcatcgttatcttaaagttcgaaccgatgtcttcgcgtataagtcgaagcgtgtaaccgtctgatatagacgcgttataatagtatgtatgaatataatccccgaaaatatctttggtattgtatccttcaccgattattggagtacctgtcaatgctatttttatagcattctcatcgctcgcaatcaaatttttcaagaaactgccctcaggattatagtttcggtgtgcttcatcaataaagtaaatgcgcttcaccttgacattatacgcatttttggcaagtgcccgactgtccttggagaatttgtggatattgacaaccgttatctctaatttaccctctttgttttgggtagtcacaccatcctttatcagcttggcaaagtcttctttactttgaacaggattgactttcagtcccctgcgagtaaactctttttgagcctgttccaaaaggtcgatacggtctacaataaagaaaaactgcggaacaatgccttgctgagaataataatcggtcagatatttgacattgaaatacgccaacgcagtctttccgctaccttgcgtatgccaaataatacccttttgctcccctttatcaaggtggcgttcaatcgcttttgtggcgaacacttgcggatagcgcataacatgcttttgtaaaccgtttgggtggtctacataagcgatgccatagcgcaagaaaaaatagaaacgttcaaaactgaacaggctttcacagaggcgctttgttggcgtttcggctttgcagttcgttttgtagtcgctattgtttttgtattgaggcacattattgtcacgcagcaatatttcctcgtcttcaggagtaacgggatggtatccccataagatgcataagagtgggaaatttcactctgctatcttcacaaaatgcacccattgcttatttcgtatattaaagcaaaacaccttcgctatctttgcgaggctgaccaaagcctatcagacagtgaaggtgtttttatatcttggtgttaatattttatttcaggtcattaacgcattgtttagcaaatgcaaagttagcactttttattgatatccattgcacatttgagaattaagtttacaagaatcttgcagcacgacctcggtcatggcggttgtgtttatgtcggtcggcatggcaactttaccgtacccgtctatcgtgattatattcctttttcttttcatcggtgtttcgttttaaggttgtcaaatggcacctgagcggtaatttttgcgtatagttgggcggctttatcttttggggaacattcaacaggcggatattggattcggtattagtcttctttcttcgggtgataatccacagattgccctcaaagaatgtttggagattgtcggtagtcaggttcttcacatcggaataataccgctggaatgttacctttgccctgctgtatcccattttttttggcaaactcggtattgtgttactcgaagagtttcggtagggtttcccgcttgacaccgatactgggataggcatccttgagtttggcggcggtgactcataccgtccgttgcggcagggaactgaggcgatgttgcatgtgaatgaatgtacggttatatgcaaatggaactttctcaccaccggagtctctgtttcacaaccattaattcagtgaaataaaatacgtactttcctttctaattgtttgtaaagtaaatatttacatgattttacgtgtaaatatttactttccatgcctctttgttatttaatatttttgtgtattcatcgtgcattggggcagtgaaacgcttccgggcggtttggtataaattttaaacaattagaaagaataatgaaatcaatgaaaacacatcgtctgtcaggggcggacacatcgtctgttacactcgtatacatcatccgtaggggtggaacacatcatcggttctgtcgctctgcgttgctgttccgtaccgctacgccgtagatatacgatagtatatcttatcttctattgaattatattgtgtacgctgcgtggccggaagcatggctgccgcacgtgcataaccggttgacgtaaaggcatgtgccgtgaccgccggagcggtcgttttccggtttcgacatttatcaatatttatctgtaactttagtatgaaaaacaatttgcttagaatgggctatgtcatggtttcgcgtgcattgctacaagagatttgcgagaaaaaaggtgcggcatgctgcgaggaagaagccttcctgcgggtgctgacaaacgtcaacttcaagcctgccgtagtattctgcaacggagccggggtgcagtgtgcccgtggagagtccgtcatcacttttatgggctgggcggacatattcggctggacaagggcgcgtacccggcgctttttcgaccggtgcttcgctgcaggacttatcgagcgcgtgccgggctgttgccccagccacatccatgtgcccggctatgatgcctggacgggacagccggcatccattgggaaggttatgaacgctgccggcagcttttccgccactgccgcccccgttgccgccaagtcgaaatcctccgccgctttcgaagagtcgctgagggagtttcttgcctattacggccgcaccacccatctgccggtggagaacggcagctatgtccgcgccctttggaaaaaactctccacccgcgagcgcgaacttgcctaccggaaagtggaagattattatttcagcctgaacaatacgcatttctgctaccaggctgccaaatatctggaatatagaatctttgaaaacgaatttgtcaattaatcgcccttttatccttatggcagaaatcctcaatcctcatgatgccgacctggagtcggtaatcttaggcgcttgtctcgccgaaagtaccgctatggtgcttgtaagcgggaaactgtgccccgaaatgttttacgaagcgaagtatggcgaaatctttgccgccctgcttgccatgcaccgcgcgggcaaggcgatagacatcattacggtgcgtgccgagcttgccgcccgtggcaagctggagttcgtgggcggcgccttcgaactggcgcgtctgttgggcagggtggcatcgtccgcccacctggagtatcatgcgcttatcttgcgcggcatgtatatccggcgcgagatgattagcggcctgcatcgtctgcttgccgtagccgccgatgagtcggtggatttgggcgatgccctggccggactgcatcagcttatcgaacacctggaaggtaaaaccgactttgccggctgcctgcgcgacatggaccgcctgatgctggatacccttaggcaaatggacggcagggtggcgaacaaccgcaacggcatcaccggcatccccaccggcctgcgcgacctcgacaggctcactgccggctggcagcggggcgatctgcacatcatagccgcccgtccttcggtgggcaagaccgcctttgccctgcatctggcactggcggcgggacgtgccgggaagcaggtgttggtgaacagcctcgaaatgcagggcgaaaggctgggcgaccgctggctctgcgcacaggctgcctcgctggatgccggacacctcaaaagcgggcaactcagcgccgacgagcagcaacaggctctggaagccgcccggcaactgtcgtgcctgcctgtgtatgtggacgacaacccgaaggcgagcatggatcatatccgctcgtcggctctgctgcaaaagagcaaggggcattgcgacctgctgattatcgactatctgcaactctgcgatatgaagtcggaacagaagaaccgcaaccgtgaacaggaagtggcggaagcgagccgcaaggcaaagctgatagccaaggagctggatattcccgttatcctgctttgccagttgaaccgtgagtgcgagatgcgtgccgacaagcggcctgcactgagcgatctcagagagagcggtgccatcgagcaggatgccgatgtggtgatgttgctctatcgtcccgcactgtacggactgacgtccgagcgcaagagcaagttcccttccgaagggttgggcatggtgattcttgccaagcaccgcaacggcgagacgggagatgtatatttcgggcataaccccacgctgacgaagattggcgagtacgaacccacactggagtggatggcgagaaacgcacgctcttcctgttagaaaaaaacttcgcttttatcggaaaataaatggcaaaatacttgactttgcctctctgatttcgtatctttgtaatgtgctcgagaagggaagtaattattggataaggcgtcttaaatcttttgtttgttgtgtggcccgggctttttcttttaagaattttatttactgttttttttaatctaaacctaaactttatttttatggatgtacttgtagaacgctttcagcgtcgtagaatcgtgagcgataaaagctctcccatgttgtattatctccgtcagaaacccaaaacgtgcggaacggtggatattgatgtcctcgccgccagtattcagaagaactgcgccatgacaaaaggcgatgtgaagcacgtgatagaggctcttgtggaagagattcaggcgaaccttgccaacggcgacaaggtgaagctgaaccagctcggcacgcttcacatgacgttccgctgtccgggtgtggagaagtcggaagactgcacggtgaggaatatctccaaagtgaatatccgctttgtgcccgacaaggagctgaagcttgtgaacggcagtacggctgccacccgcagcccggcaaacgtggctttctcgctggacaagcctgcggacggcagttcttccggtggtagcggcggcaatagcggcgaagaggagaatccgctcggatagtcggtttcctgctgatttccggtatcagtcttagggcttgtctgaatattgttctgaatattgtttggaaagcatgtttcctgcttcttccggatttcccggatttcttttcatcccgttttccttttttatgcggaacagcattcgggcacgcccttatcatagtttttaacctaacccttaatttaaatcttatggcaacaaaatcaaactggtgggacaagctccttaaaatcgtaatcgccgtagcttcggctgttttaggcgctttaggcatgaacgcaatgcccgcctgattgtacttcatacgtaaattacgtacttaattcttaagttacttaactttatacttaataaaagtgagatttatcaacctcatcgtcattcactgttccgctacccgctgtgaccgtagctacaccgaacatgacttgacaacagaccacctgcgccggggcttctccggtgcaggttatcactattatatccgcaggaacggcgatataaagacgctccgtcccatgacacagcccggtgcgcatgtccgcggctacaacgcccacagtttgggcatctgctacgaaggcggactcgatgcgcacggacatcctgccgatacccgcaccgattttcagaaacactccctgcgggtgctcgtaatgctgttgctgcgcgattatcccagcagccgcctctgcggtcaccgcgacctcagtcccgacctgaacggcaacggcgagatagaacccgaagagtggataaaggagtgtccctgcttcgatgcggctacgattgtgcgggaagctgcgccgcctaatccggggtgtgcggggtgaggggagatgttttttcagtctttccagtttctttccagatttgccccatacttttgtggcatgagaagaggttgtatcaatgaagcctcttatggtaaagagaaaaacagtgtcttgaatttataaatgaaaaaaagaatgattatgaaaaaacatttgtttgccatggtttgtatggctgtgagtttgtggagttgcagtaatgacgatgcacctgttgtcggtggtccggaaaacggtaaggtgagtgccgaggcgcaggctgctttgttccagctctatccgaatgctaccgatgtgaactggtcggtgaaaggagagtatgtggtggcggatttcaatatgacggctacccgtgcggcagcaggcgaatatgcggcctggttcgacaatgccggccggtggtacatgacgacggacagtgaaattctcttcgaccagttacccgcagaagtgaaaaccgctttcggcgagagcgagtactccgcatggaccgtcgacgaggtggaacggattcagcgcaatggcctggaagatgtctatgtgattgaagtgaagaatacggtagacggcgtggcaacggaaatcgacctttattattcgaaggacggcgtactggtgaaaaaactggtcgacatggacgaagattatgattacagcgattacatccccgtagctccggccgcaggtgtggacgcgttcctgaaagcgaacttccccaatgcccgcattctggacatcgaccgtgaggataacatgacggaagtggaaattctggatggaaaggtagtgcgcgaactgctgtttgacgggacgggcaactggctgtttaccaagaccgaaatgagctatgccgcattgcccgctgtggtgaaacaggcgttggacgcttctgaatatgccggttaccgggtggacgatgtagaccattatgtaacttcggcagaggaatattaccgcctcgaactggagtctgtcatgggtgacgtgaaagtaaagattaccgccaccggcgaattgtcgccgatggagcagaaccctgccggacccggaaataacaccggcggcatactgaccgacaaaatcaaggagttcatcactcagaaatatgcgggagcgcgtatcatcgaatccgatatggagaaaggcatgacggaagtggaaatatttcacgaaggacgtgagaaagatgtgtacttcaacggtgcgcaggattgggtgagaaccgaatggggcgtgcgggtgaatgaacttcccgcggctgtgctcgatgttatcagaaaaacgtatgcggattataggatagatgatgcggattatgtggaaacacgtaccgaatcgtattatctggtggaactggaacggggagaaaacgaagtcaatctgcgtattcttccaaacggaacgattctttaacggagtgattctttaaacgaaaatggctttgacagcctctgatatatgcgcgcgtacgggcgcgcatatattatattgtgtccctcttttcatccctttctcccttctgctggcgttcaaaaaaaatatgttcttcaacatgtttatcaatcagcgtgttacgaaaaagttttcatattccgtgtaaaaaatctcctgatatatttggtgtgtatgttataaagtcctacttttgcacccgctttcgagaagggaagcagcgatgttttgacattctgacaggaacggcgtaggaactcttacatatttcttctgcttggggcttgtttctttctgaaattcctcctttgaaaaagcagaatgaaaaaaaacttccgaaaacatttggaagatatgaaataaagttcttacctttgcacccgctttcaaaaagtaagcagcgttggttgacacactttttcttgaatccgggtcggtaaaacaatctttcttttgttctccctttcgcaagagagatgacgggaaaaaggaaagatgaaaaaaaacttccgaaaatatttggaagatatacttaaaagtttttacctttgcatccgctttcctgaaaagaaagccgacataaaagaagcgatctttgaagagatttacataaacaatacaagtagtacaagagcaagacttgtttctgaaaaagaaacggtcttgggtaaaataaaaagaaccgtcattacttattaaataggtaatagatactttttaaattcgagcgtcctgaacagagcaacaaccgttcctttatggaatgattaacaatacttttacaatgaagagtttgatcctggctcaggatgaacgctagctacaggcttaacacatgcaagtcgaggggcagcatcatcaaagcttgctttgatggatggcgaccggcgcacgggtgagtaacacgtatccaacctgccgacaacactgggatagcctttcgaaagaaagattaataccggatggcatagttttcccgcatgggataattattaaagaatttcggttgtcgatggggatgcgttccattaggcagttggcggggtaacggcccaccaaaccaacgatggataggggttctgagaggaaggtcccccacattggaactgagacacggtccaaactcctacgggaggcagcagtgaggaatattggtcaatggacgagagtctgaaccagccaagtagcgtgaaggatgactgccctatgggttgtaaacttcttttatacgggaataaagtgagccacgtgtggctttttgtatgtaccgtatgaataaggatcggctaactccgtgccagcagccgcggtaatacggaggatccgagcgttatccggatttattgggtttaaagggagcgtaggcgggttgttaagtcagttgtgaaagtttgcggctcaaccgtaaaattgcagttgatactggcgaccttgagtgcaacagaggtaggcggaattcgtggtgtagcggtgaaatgcttagatatcacgaagaactccgattgcgaaggcagcttactggattgtaactgacgctgatgctcgaaagtgtgggtatcaaacaggattagataccctggtagtccacacagtaaacgatgaatactcgctgttggcgatatacagtcagcggccaagcgaaagcattaagtattccacctggggagtacgccggcaacggtgaaactcaaaggaattgacgggggcccgcacaagcggaggaacatgtggtttaattcgatgatacgcgaggaaccttacccgggcttaaattgcaactgactgaatcggaaacggttctttcttcggacagttgtgaaggtgctgcatggttgtcgtcagctcgtgccgtgaggtgtcggcttaagtgccataacgagcgcaacccttacgggtagttaccatcaggttatgctggggactctacccggactgccgtcgtaagatgtgaggaaggtggggatgacgtcaaatcagcacggcccttacgtccggggctacacacgtgttacaatggggggtacagaaggcagctacacggcgacgtggtgctaatcccaaaagcctctctcagttcggattggagtctgcaacccgactccatgaagctggattcgctagtaatcgcgcatcagccacggcgcggtgaatacgttcccgggccttgtacacaccgcccgtcaagccatgaaagccgggggtacctgaagtacgtaaccgcgaggagcgtcctagggtaaaactggtgattggggctaagtcgtaacaaggtagccgtaccggaaggtgcggctggaacacctcctttctggagcgacgctcagaaaaagacgaaaagttggttctaaagagattacctccataagaacctcttgtactgcgaagattgtttattaataatataaagagaaagtagaagccgagccttcgggctagggtttgactgacagtcctatagctcagttggttagagcgctacactgataatgtagaggtcggcagttcaactctgcctgggactacgacatagtcttggtgagagacacggacgattttaattactaattctaattactaattaccaatcactgaccgtctattactaaccactatctcgggggattagctcagctggctagagcacctgctttgcacgcagggggtcaacggttcgaatccgttattctccactcttgagattccgttaaatcggaatattctcaaacgatctttgacatgatgtaacagaaaaaagtaaagttaaagctgaaagtatatatcgaccatacgttgtcggtaagactaaaagtaagcaagggcgcatggcggatgccttggctctcggaggcgatgaaggacgtgataagctgcgataagcttcgggtaggtgcaaataacctttgatccggagatttccgaatgggacaacccgattggttgaaggccaatcatccaaccaagttggaggctaacgcagggaactgaaacatcttagtacctgcaggaaaagaaaataaataatgattcccctagtagtggcgagcgaacggggactagcccaaaccacctatgttacggcatatgtggggttgtaggaccacgttgtggcaagaaaactggtgagtagaatgttctggaaagttcaaccatagagcatgatagttgcgtatacgaagccagtcgaagcctagtggtatcctgagtagcgcggagcacgaggaattctgcgtgaatcagccgggaccatccggtaaggctaaatactcccgagagaccgatagtgaaccagtactgtgaaggaaaggtgaaaagcacttcgaacagaagagtgaaatagttcctgaaaccatgcgcctacaagcggtcggagctctaacgagtgacggcgtgccttttgcataatgaacctacgagttactttttccggcaaggttaagggtcttgagacctgcagccgaagcgaaagcgagtcttaacagggcgttcagtcggaaggagtagacgcgaaaccaagtgatctacccttgggcaggttgaaggatgggtaacaccatctggaggaccgaaccaataagcgttgaaaagcttctggatgacctgagggtgggggtgaaaggctaatcaaacttggagatagctcgtactccccgaaatgcatttaggtgcagccttgacttatactggcatgaggtagagcgactgataagatgcgagggcttcaccgcctatcaagtcttgacaaactccgaatgcgtgtcagttctatgtcaggagtgagggcatgggtgctaaggtccatgtcctaaaggagaacaatccggaccaacagctaaggtcccaaaatgaatactaagttgaactaacgaagtcagattgctaagacagctaggatgttggcttggaagcagccattcatttaaagagtgcgtaacagctcactagtcgaggagtttggcgtggataataatcgggcatcaagtattctaccgaagctttgggatgtgtaaacatcggtaggggagcattccactcagcgttgaaggtgaggcgtgagccttgctggagcgtgtggaaaagcaaatgtaggtataagtaacgataaagggggtgagaaaccccctcgccgaaagactaaggtttcctgatcaacgctaatcggatcagggttagtcgggtcctaaggctcagccgaacggcgaggccgatggcagaaccggttaatattccggtactacctcaaggagtgacgtggagacggagcagtgacagtgccgcggactgacggaatagtccgttaaagggtgtagatgttgattcctgcaggcaaatccgcaggaagagtcgaacctgatagtatggagcgtccttcgggacaatccaatagtgcatgtaagcatactcccgagaaaatccgctaaacttaatccttgtggtacccgtaccgcaaacggacacacgtagtcgggttgaatatactaaggcgcttgagtgattcacggttaaggaactaggcaaactgaccctgtaacttcgggataaagggtcctcagggtgacttgaggcgcagagaatcggtccaggcaactgtttaacaaaaacacagggctgtgcaaaatagaaatatgaagtatacagcctgacacctgcccggtgctggaaggttaagaggagatgtcatcgcaagagaagcattgaattgaagccccagtaaacggcggccgtaactataacggtcctaaggtagcgaaattccttgtcgggtaagttccgacctgcacgaatggtgtaatgatctggacgctgtctcaaccgtgagctcagtgaaattgtagtatcggtgaagatgccgattacccgcgatgggacgaaaagaccccgtgaacctttactatagcttaacattgaatttgggtaattgatgtgtaggataggccggaggctttgaagcaggtacgccagtatttgtggagccgctgttgaaatacggccctttgattatttgagttctaacccgcggctgcggggacactgtttggtgggtagtttgactggggtggtcgcctccaaaagcgtaacggaggcttctaaaggtgccctcacgacgattggtaaccgtcggcagagtgtaatggcataagggcgcttgactgggagactaacaagtcgatcaggtaggaaactagagcatagtgatccggtgtttctgtatggaaaggacatcgctcaaaggataaaaggtactccggggataacaggctgatccctcccaagagctcatatcgacggaggggtttggcacctcgatgtcggctcgtcacatcctggggctggagaaggtcccaagggttgggctgttcgcccattaaagtggcacgcgagctgggttcagaacgtcgtgagacagttcggtctctatctatcgtgggcgtatgaaatttgcgtggctctgacactagtacgagaggaccgtgttggactgacctctggtttaccggttgtgccgccaggtgcattgccgggtatctaagtcgggattggataagtgctgaaagcatctaagtacgaagccagccacaagattagatttcttagggtcgtcacagacgatgacgttgataggatgcaggtgtacaggcagcgatgtcatagccgagcattactaattgcccgttcacttttggtctttccgtgtatgggtggtatatacgttcagtttaccggtttcattaccggttgttctttactttttacatcatgtctgccttattcaggtgactatagcactgaggttccacctcttcccattccgaacagagaagttaagctcagtcacgccgatggtactgcgtaacagtgggagagtaggtagtcgccgtttttttagagagagaagcccttgtatcggaagatgcaggggctttcttgttttggggctatcattccgaacagagaagttaagttcatttgtctgccttgccttgccttgttttgcttgcttttcttttctttgttttgcttgttttcttggggtcagcagatgtttagtggggattattcttatacttgtgaagtatcttttttttctttgcttttaggatattatatcgtatcacatcatacccatatcacatcatatatctggcaagcatctcctcttatgtctttctgttcttatgtctaaaaagaatgccatctctcctaaatccccttagtacagagaatttactgtacagccagaacaacaccccgaactacatccccctctctttacgttcttttgttcttctgtctaaaaaagaatataaaaataatgtcacaaaaaatgatagtgtcaccagacaaacaatcaatttaccgataagtttattcttacttctcttcttcctcgttttggaaaaccgggttgtttttcgtatatttgtcagcgaactgattttttaattaatatttaaagcaaattgaagtatgaaaactaaagttttattcgctgctgtggcagtagcattttctttcgctgtaacatcatgtggtaacaaaaaagctgctgatgccaatgctgccggagcagactcttgttgcgctgcacaaacagaacaggtatgtgactctgcaaaggcttgctgccaggctgattctgccgtttgtccgaaagccggttgcgcgaaagctgattgtccgaaggccgcttgcgacagcgccaagtgtgacaaaccttgtgaaaagaagtaattcaggacttgtatcgaactgaaacataaaggaaaggcgtgcctgtttggtacgcctttcttgtgatatattggtgcgataaatgaatataatcttataaaatgatattatttcagatgaaaaagttactgatttatttgtatgctacaaaataatctatacctttgcatcattaaacaaaaaaacaagatgattcagaactttacatatattctactgtgtggtattattattctactggcaaagtttagtggaagtgagtgctgtgcataaatatatgtaagatataacaatatacgaaagcctttctcacttccctgtgtgaaaggctttttttatggaatatgaatttataaatacaatgaagcgatgagtgataaattatttattttcgacacaacgctccgcgatggcgagcaggttccgggatgccagttgaatacagtggaaaaaattcaggtggcaaggcaactggaagcgttgggcgtggatgtgattgaggcgggattccccatttcgagtccgggtgactttaactcggtgattgagatttccaaagctgtgacgtggcctacgatttgcgccttgacacgtgccgtacagaaagatattgacgtggcggcggaagctctgcaatttgccaagcataaacgtattcataccggtatcggtacttccgactcgcacatcagatataaattcaattccaaccgcgaggagattatcgaacgtgccgtagcggcagtgaagtatgcccgccgctatgtagaggatgtcgaattctatgccgaagatgccggacgcacggataacgaatacctggcgcgtgtggtggaagccgttatcaaagcgggcgctacggtggtgaatattcccgataccaccggttactgccttcccggtgagtatggtgcgaagataaaatatctgatggagcatgtggacggcattcataacgctgtcatctccacgcattgccacaacgacctgggaatggctactgccaatacaatggcaggtgtgctgaacggcgcccgccaggtggaagttactatcaacggtatcggcgaacgtgccggaaatacttcgctcgaagaggtggctatgattatcagatgtcataaggatattgatattgaaaccaacatcaacacgcagaagatttaccctaccagccgtatggtatccagcctgatgaatatgccggtgcagcctaacaaggcaatcgtaggccgtaatgcctttgcgcactcgtcgggcattcatcaggacggcgtattgaagaatgtgcagacttatgagattatcgacccgcacgatgtgggcatcgatgacaactctatcgtactgaccgcccgtagcggacgcgctgccttgaagaaccgcctgcaggtattgggcgtgtctctggatcagcagaaactggataagatttacgaagatttcctgaaacttgccgataagaagaaagatattaacgacgatgatattctggtattggcaggtgcggaccgctcgcagaatcatcgcatcaaactggaatacttgcaggtgacgagcggtgtaggtgtccgttcggtagccagcatcgggttgaacatttcgggtgagaagtttgaggccgccgccagcggaaacggtccggtagatgccgcaatcaaagccctgaagaagataatagaccgccacatgacgttgaaggagtttaccattcaggccatcagcaaggggagtgatgatatgggtaaggtgcacatgcaggtggaatatgataaccgtatctactatggtttcggcgccaatacggatattatagctgcgtcggtggaagcgtatatagactgtattaataaattttagcggttagtgattaacgattagtgattgataatttgtaattaatacttattctgatgaatacattatttgataaaatttgggatgcccacgttgtacagaaggtggaagacggccctacacaactttacatagacaggctttattgccatgaagtgaccagcccgcaggcttttgccggattgcgtgccaggggaatcaagtgtttccgtccgggaaagatattctgtatgcccgaccataatacgccgacgcacgaccaggataaacctatcgaagaccccgtgtcaaagacgcaggtggatacgcttgccaagaatgcggaagatttcggactggagcatttcggcatgatggacaagaagaacggcattatccatgtggtgggtccggaacgggggctgaccttgccgggcatgacgattgtatgcggtgactcgcatacgtccactcacggcgcaatgggggcggtggctttcggcatcggtacgagcgaagtggagatggtgatggcttcgcagtgtattctgcaaacccgccccaagacgatgcgcattaccgtagacggcaaattgggtaaaggggtgaccgccaaagatgtggcgctctatatgatgtccaagatgactaccagcggcgctacgggctactttgtggagtatgccggagaggcggtgcgcagcctgtccatggaaggacgccttacgctgtgcaacctcagcatagaaatgggtgcgcgcggcggtatggttgctccggacgaaacgactttcgagtacatcaagggacgcgaatatgctccgaaaggcgaagcgtgggacaaggcgctggcatactggaaaacgttgaaaagcgctgaggatgccgtgttcgataaggaagtacgcttcgacgccgccgacatcgagccgatgattacctacggaaccaatccgggtatgggcatgggcatcacgcagcacatccccgctaccgagggcatgggcgaggccgccaaggcgtcttttatgaagtcgatggagtatatgggcttccggccgggtgaaccgttgttgggcaagaagattgattacgtgttcttgggtgcttgtaccaacggccgtatcgaggatttccgtgcatttgcctctatcgtgaaaggccgtaagaaagcggcggatgtagtggcatggctggttcccggttcgtggatggtagatgcgcagatacgtgaggaaggcttggacaaagtgctggaagaggcgggattcgccatccgccagccgggatgttcggcttgtctggcgatgaatgatgacaaagtgcctgccgggaagtatgcggtgtccaccagtaaccgtaactttgagggacgtcagggaccgggtgcacgcacattgcttgccagtccgctggtggctgcggcagcggcggtgacgggggtgattacagacccgagggagtttatctaaatcaaggttcactacagagggagaaactgaaggcctatgtcctctgtagtgaagaaagaacaatcaaataacagcaacaatgaaacagaaattcaatatcatcaacagcacttgtgtacctcttccgttggagaatgtggataccgaccagataatccctgcacgtttcctgaaagccaccacgaaagaaggttttggcgagaacttgtttcgcgactggcggtatgacaagcaaggcaacaaaatagaatctttcgtactgaacgaccctacctacggcggacaaatctttgtggccggcaagaacttcggttcgggaagcagccgcgagcatgcggcatgggccattgccgactatggtttccgcgtggtggtgagcagcttctttgcagatatccataagaacaacgaactgaataatttcgtgcttcccgtggtggtgagcgaaccgtttctgaaggagcttttcgactcggttttcgccaaccccaaaacggaagtggaagtgaacctgcccgaacagaccattaccaacaaggccacgggcaagagcgagcattttgaaatcaatgcctacaagaaacactgcctgatgaacggattggacgatatagatttccttgtagagaataaagacaaaatagaatcctgggagaagaaacatgaagcataatcatccgaagatagaaatcatggacaccacgctccgcgacggcgaacagaccagcggagtgtctttcgtgccccatgagaagctgatgatagcccgtttgctgcttgaagacttgaaggcggaccgggtggaagtggcttccgcgcgggtgtctgaaggggagttcgatgcggtgaaaatgatatgcgactgggccgcccgccgcaatatgctgccgagggtggaagtgctcggtttcgtagacgggcatacgtcggtggactggatacacgctaccggctgccgcgtcattaacctgctgtgcaaaggctcgctgaagcattgctcctgccagttgaagaagttgcccgaagaacatatcgaagatattctggcagtggtggactacgcaaacgtgcaggacatggaggtgaacgtctacctggaagactggagcaacggcatgaaagattcgcccgaatatgtgtttcaattgatggacgcattgatccggaccaacataaagcggtatatgctgcccgatacgttgggggtgctgaacccgttgcaggtcattgaatttatgcggaaaatggtgaaacgctatccgcacgcgcatttcgacttccatgcgcacaatgattacgaccttgcggtgagcaatgtgctggcagccgtgttgagcggttgtaagggattgcacaccaccattaacggtctgggcgagcgtgccgggaatgcgcctcttgccagcgtgcaggccatcctgaaagaccatttcagtgctgtaaccaatatcgacgagagccgcctcaatgatgtgagccgtgtggtggagtcttattcgggcatcgtaattcccgccaacaaaccgattgtgggtgagaatgtgtttacgcaggtggcgggcgtgcatgccgacggagataataaaagcaacctgtactgcaacgacctcttgcccgaacgcttcggtcgtaaacgggagtatgcgctgggcaagaacagcggcaaggcgaatatccgcaagaacctggaagacctggggctggagctggacgaggatgccatgcgcaaggttaccgaacgtatcatcgagctgggcgataaaaaggagctggtgacgcaggaagatttgccgtacatcgtttccgatgttttgaaacacggcatgatggacgagcgggtgaacctgaaaagctacatcgtgaaccttgcctacggactgaaaccgatggctacgttgaaaatagaaatcaacggcaaggagtatgaggagagttccagcggcgacggtcagtacgatgcctttgtgcgtgcgctgcgcaagatatacaaggtgactctggggcgtaagttcccgatgctgacgaactatgcggtgaccatcccgcccggcggacgtaccgatgcctttgtgcagacggttatcacctggagttttgaagacaaggtgttccgtacccgcgggctggatgccgaccagacggaggcggccattaaggctacggtaaagatgctgaatataatagaagctgaatacgataaataagatgcccaaccatgattgataagagaataaaggattatttcgaaagaaaacccaatgtaagctatctgttttttgcttgcatgatatttttgtttcgtgttttcttgaattggtatgcaaatgagctgcagctcgtcactcttatggatgtgatatggacgcttatgctgactgcgggatttgtgacgggtgaccgtgttcgccgcaagaataaagcaatgaaagataagatagaaaatgaattgaaaaagaaataataattatggactttaaaattgcagtattggccggtgacggtatcggccccgaaatatccgccgtaggtgtggacgtaatgaccgccgtttgcgagaaattcggtcacaaagtaagttatgagtatgccgtgtgcggtgcggacgccattgacaaagtgggcgaccctttccccgaagctacctatcaggcttgtaagaatgccgatgcagtgctcttttcggcagtaggcgacccgaaattcgacaatgaccccaccgccaaggtgcgtcccgaacaaggactgctggctatgcgcaagaagttggggctgtttgccaatatccgtccggtgcagaccttcaagtgcctcttgcacaagtcgccgctccgtgcggaactggtggacggtgcggacttcatctgcatccgcgaactgacgggcggtatgtatttcggcgagaagtatcaggacaacgacaaggcctacgacaccaatatgtatacccgtccggagattgaacgcatcctgaaagtgggctttgagtatgccatgaagcgcaacaagcaccttacggtagtggacaaggcgaatgtacttgcctcttcgcgcctgtggagacagattgcgcaggaaatggccccggactatccggaagtcaccacagactatatgtacgtagacaacgctgccatgcgcatgattcaggaaccgaagttcttcgacgtgatggtgaccgagaataccttcggcgatattctgaccgatgaaggctcctgcatcagcggctccatgggcttgctcccatcggcttccacgggcgaaagcacgccggtgttcgagcctattcacggctcatggccgcaggctaagggcctgaacatagccaacccgctggcacagattctttccgtagccatgctgttcgagtatttcgacctgaaggaagaaggcgcgcttatccgcaaggcggtggatgcttcgctcgacgccaatatccgtaccccggaaatccaggtggaaggcggcggcaaatacggcacgaaagaagtgggtgcgtggattgtggactatatcaaacactaatctttattaaggaaagaaagggcgaaacgtttttttcctacctttgcgaggagatgcgtcaagagtacggcaatagcgagcctgcttttggtgtgtctcctcatttgtgtcttattctgtataaactcggacgaattatggcgaaaatagcgaataacttgacggaacttatcggcggtacgccgctgatgaaattggcggggtacagccggaagtacggattgcaacgagaggtggttgccaaactggagtcctttaatcccgcaggcagcgtaaaagaccgcgtaggtctggcaatgatcgaggatgccgaagcgcgcggagcgttgaagcccggtgccaccattatagagcctaccagcggcaatacgggagtaggactggcaatggtggcgaccattaaaggctatcatctgatactgaccatgcccgaaaccatgagcatcgaacgccgcaacctgctgaaagccctcggagcggaaatcgtgctgacggacggattggcaggcatggcgggctctatcgccaaggcgcaggaactgagggacaagatacccggtgccgtgattctgcaacagttcgagaacccttccaacgcccggatacacgaacttactacgggcgaggaaatctggacggatacggacggacaagtggacgtgtttgtagcgggagtaggtacgggcggcacgatttgcggtgtggcgcgcgccttgaaaaggcataatccgaatgtctacattgtggccgtagaacctgcatcatctcccgtgcttgaggggggcgaggacgctcctcaccgcatacagggcatcggggcaaactttattccggccctttacgatgcttcggtagtggacgaggtgattcccgtgccggatgatgaagccattcgcgccggacgcgaactggcatctaccgagggattgctggcgggaatatcttccggagcggctgtctatgcggcacgtctgctggcggtgcgtcccgaatttgccgacaaaacggtggtggccttgctgcctgatacgggagagaggtatctctctacggagttgtttgcttttgacacctatcctttggattaaatgccggggacggacgtttgtttcacccggtggtagcggtcataccgacgggtggtagcacttgtaccgtcgcgtggtattgcccgtaccatcctttggtactctttgtaccagcgcttggtactgtccgtaccaccgcctgatattctttgtacccttgcttggtacttcctgtaccggcaggtgacacggatacgggtgcattaataaatttagaatcataagtatgaagaaactgatttttctcgcagtatgtttattggtaagcggtatgcctgcgttcgcgcaaacctatcaggaactttgcgaccgtgccgtaacttatacggagcaggatagtctgccgcaggcggaaacgtacatccgcagagccttgaagctggagcctgcgaatcctcataacgcccttctgttctccaacctcggtacgatacaacgctgccagcggaagtacgaaaaggctttggagtcctataacttcgccctgaatatagccccgcgggcagtgcctatcttgctgaaccgtgcgaccatttatatggaactggggcgcaacaacctggcacaagccgactattcgctggtgctggatttggagaaagacaacgaagaagccctgctgatgcgcgcttatatttatatgcaacagcgtgactataaaatggcaaaggcggattacgaacgtttgttgaaagtgaatcctaccagctacaacggccgtctcggtttggctactttagagcagagagagggaaaatacgaagaagcactgaggctattgaacactatgattgccgccaaaggagagaaccggcagttgtctccttcccaatatgccatgctttatgtggctcgtgccggagtagaaaaagacttgcaccatacagatatggcattggtagacctggaagaggcgataagcctggatagctcgcagcctgaaatatacctgatgcgcggcgaaatctacctcgcccaaaagaagaaagaccttgccaaacgcgatttcgagaaagccatatcgttaggagtaccgcaatctgatttacgcaacttcttacaacaaacggggaaatagggggtagtggttagtgattagcgtttagtgattagtgattagcgtttagcgtttagtggttagtgattaagttatgtacaataaacagttaactgctaattgcaaaacactcactgctcaccactaatccttaatcgctaatcactaatcactaatcgctaatcactatattttcgtattaggttgataaattctttgccgtatttcttttttttgtgttctccgatgccgctgatgttgccgaactcttcgaggctggtggggcgtgaggtgctgagcaagtggagaaccttgtcggacaggacgatataggcaggcagggcctcttcatcggcaagacgttttcttaatttgcgcaatgcttcaaagagggcttcgttctctgtattgggaagtcctaagggtagctcttgggcggggacggttgctttgcgttttctgccacgtttggtttcgtttgtttcttcccggcgtatcactaccaatcgggcggtggctctgccaaagaggacatcgcttcctgcggaagttattttcagatgattgttttcgttgtaggcaatctcgaagtatccgagttgcagcatttgtaataaataatcatgccagtcgcgggcgggaacatcacgtccggcggcaaaggttttcagttgctgatagcctttgcctacgacttcggacgacatgtttcccctgagaatatccactaaaacacctgtaccgatttgctggtctgtgcggacaatggcgctcagggctttttgtacgatgacagttccgtcaaagcgttcgggcgggttcttgcagacgtcgcaattgccgcagtcatggtctgctatttctccaaaataacttaacaatatgcggcgtcggcagatgtcggattcggcgtattgctgcatgcgttgcagtttctccaggttgatgttctgttgtccgctctcggtagcgaatttggtaagcaaaatcaggtctgcaagcgagtagaacagtagcgtgtcactgggcagtccgtctctgccggcacgccctatctcctggtagaaactctcgatgctctttggtaaattataatgaataacccaacgaacgttgctcttgtctatacccatgccgaaagcaatggtggcgcacactacctgcacgcggtcgttgatgaaatcgtcctgcgcttcgtctctgagggagggggagaggccggcgtggtagacggcggtgcggataccctgcttctggagcatctgcgccacggattccgtcttgctacggctcatgcaatagatgatgccgctttctccgggatggcgggctatgaagtcaagaattgtcttggatttttccttctgctggtagccccgttttacggtgaggctcaggttgggacggtcgaacgaggagatgaacgtccggggatggttcaggtgaagctgcctgatgatatcttcgcgcgtgattttgtcggcggtggcggtcagggcgatgatgggcacgtgcgggaactgctggtgcagaatccccatctgtgcgtattcaggccggaagtcatgtccccattgcgaaatgcagtgcgcttcgtcgatggcgaaaagcgagatgtgcatgtcccgcaggagataattggcttctgtaagcagcttttcgggcgagatatacagcagtttcagtctgccttccatgcaggcacggcgcagggcagcattttccgtttcgtcattgctgctgttcagcgcaccggcgctgatgccgttggcgcataatgcctctacctggtccttcatcagcgagatgagcggcgaaacgactaccgcggttccttcgcgcagcagggcgggaagctggtagcatattgattttccaccgccggtgggcattaacacaagtgcgtcgtttccgtccagaatgtgacggataatctcttcctgaaggggacggaaactgtcgtatccgaagtatgttttaagcgtttgtagcataagcagtgccggtatctttttatcaggggacaaaggtacgttaattcttgcataaaatgcaaaaggaagtggcgttcagtcaaataacttaataatgaagcagttgtgttaaataagcttgtaattaaacgtatcctgcttcttttcaagctttttcgttgtttgtatattaaaaatatgtacgggaaaagttgcgtattaaaaaaaaatgttagacttttgtgtaatctaagggaagctcctttggatttccgtatttaaacaaccctaaccagttaatttaatgagtgatttagaaaagaatgcacaggaggaggctacaaagaagcatccctataacctgcgcgaaaagaaagaaaagaaggctgcctaccgttccttgatacggccggaactggcagacgagctgtacgacaggatattgaatatcattgtcgtgcagaagaagtacagagaccccaattactctgctaaggatttggcgaaagaactgcagaccaatacccgttatttgtcggcagtggtgaactcccgtttcggcatgaattattcttgtttgttgaatgagtacagagtgaaagacgctttgcatttattgacagataagagatatgctgacaagaatgttgaggaaatcagcacgatggtaggctttgccaatcgtcagtctttttatgctgcattttataaaaatgtaggagaaactcctaacggttatcgtaagaaaaatgcagtgaaaggtaaataatgcagtaaaactgaacttataaaaggaaatattccgagccatgtgctccggaatacttccttttgttattttaatactaatcaatcttttccaaacacgcatgaaaaaacaactgatttccgtaatggttgccgcgtccttgctgacagcttgcggcggagcaccgaaaactactgccaaggcagaaaaatttgattatacagtggaacaatttgcagacttacagattttacgctatcgcgtaccggagtttgagaacttgtctctcaaacagaaagaattagtttattacctcacggaagccgctttgcagggacgtgacatcctgttcgaccagaacgggaaatacaacctcagaatccgccggatgctggaagccgtctatacgggctataccggcgacaagactgcggcagacttcaaggctatggaagtgtacctgaaacgggtatggttctccaacggcattcatcatcattacggctgcgagaagttcgtaccgggctttactcccgaattcttcaggcaagcccttttaagcgtggacgccgctacactgccgcttgcagaagggcagacggtggagcagctttatgaagaggtggctcccgttatcttcgaccccaaagtaatgccgaagcgtgtgaaccaggctgccggtgaggatttggtgctgacctcggcatgtaattattatgacggggtgacgcagcaggaagccgaagccttttacagcgccatgaaagaccctaaggatgaaacgccggtttcttacggattgaacagccgcctggtgaaagagaacggcaagattcaggaaaaagtgtggaaagtggggggcttgtacggcgcggctatcgggaagattgtgtattggctgaagaaagcggaaggcgtggccgagaaccctgaacagaaagcggttatagccaagttgatagagttttatgaaacaggtgacttgaagacctttgatgattatgccattctgtgggtgaaggatttggattcccgcatcgacttcgtaaacggattcaccgaaagctacggcgacccgctgggcatgaaggcaagctgggaatctttggtgaacttcaaggatttggaagctacccgccgcacggagattatcagcagtaatgcgcaatggttcgaagaccactctccggtagaaaagcagttcaagaaagagaaggtgaaaggtgtttcagccaaggtaatcactgccgctattctggcgggcgacctctatccttcgacggctatcggtatcaacctgcccaatgccaactggatccgcagccatcacggctccaaatccgtaacgattggcaatataacggatgcctacaacaaggcggcccatggcaacggcttcaacgaagagtttgtatatagcgatgccgaactgcaattgatagacaaatatgccgatacgaccgatgaactgcataccgacctgcatgagtgtctgggacatggttccggcaaactgcttccgggcgtagaccccgatgcgctgaaggcttacggctctactatcgaagaggcgcgtgccgacctgttcggactgtattatgtggccgatccgaaactggtggaactggggctgactccgagtgcggatgcctacaaggcccaattctatacctatctgatgaacggcctgatgacacagcttgtgcgtatcgaaccgggaaacaacgtggaagaggcacatatgcgcaaccgccagctcatagcccgttgggtatatgaaaagggcgctgccgacaaagtggtggaactggtgaagaaggacggaaagacttatgtcgtaatcaatgattatgaaaaggtacgggaactgtttggcgaactgcttgccgaaatacagcgtatcaagtccacgggcgactatgacgcagcccgtgaactggtagagtcctatgccgtgaaagtagacccggaactgcacgcggaagtattggaacgttacaagaagctgaacctggctccgtataagggctttgtcaacccgaagtatgaggctgtgacggatgcggacggcaacataaccgatgtgaaggtgacttatgatgaagggtatgccgaacagatgctgcgttatagcaaggactactcggtattgccttcagtgaacgattgaatggtaatttagagattttattgttttcttttaggcacggattacgcggattacacggatttactttatcctttttttccgtttccgtgtaatccgcgtaatccgtgcctaaaaaaatcatcaggtgcattttgacacacctcttttaagataaaaggctttttgcctcaggtaataaccggaactctcatttctgaaactaatggaactaaaagaacaactcaaagaaataaaaacccagctccgcctctccatgaatggggctgtgtctcaaagtatgcgtgagaaaggtttggtctacaaacttaacttcggcgtggaactgccccgtatcaaaagtattgcttctgcttacgggaaagatcatgccttggcgcaggcactttggaaagaagatattcgcgaatgtaaaatattggcgggattgctccagcctgtcgacagcttcttgcccgaaatagcggacatatgggtggagaatatccggaacatcgagattgcggaacttacctgtatgaacctgttccagcatcttccgtatgctcctgcgaagtcttttcactggattgccgctgaagatgaatatacgcaggtctgcggtttccttaccattgcccggctgttaatgaaaaaaggcgatatgaacgaacgggtggagaatgaattccttgaccaggcaatatcggcgttcctctcaggctcttatcatgtgcgcaatgccgcgctgaccgctatccgccgcttcatgcagcacagcgaggaaaatgcgtttcaggtttgccgcagggtagaaggcatgggagattcctcttcggagacagaacggctgctttacaatctggtaaaggaagaggtagcgttatgataaaacggtaaagtgatagagtgccggctactttaccattctcatcattaatttttctttttttgtttgctttccgcaaaaaaggcttaactttgttggctgttaaaaaactgcgcctttaaatggaaagtcagaacgtgaaagatacggttagacagatattcaccgaatatctcaatatgaacgggcatcgcaagactcccgaacgatatgccatactcgacactatttattccatagacggccatttcgatgttgacacgctttattcgctgatggcagaccaggagaatttcagagtgagccgtgcgacgctgtacaacaccatcatattgcttatcaatgcccggctggttatcaagcatcagttcggaaattcctctcaatacgaaaaatgctataaccgtgatacgcatcatcaccaaatctgcacacagtgcggcaaggttaccgaattccagaacgaggaattgcagcacgccattgagaataccagattgagccgctttaacttgacgcattattcgctgtacatgtacggcttgtgtagcaagtgcgaccgcgcaaacaaaagaaagaagaaaaataataaccataagaaagagaaatgaaagtagacattctattaggattacaatggggcgacgaaggcaaaggcaaagtcgttgatgtattaactccgagatacgatgtagtggcacgttttcaaggcggcccgaacgccggccatacattggagtttgaaggtcagaaatatgtgctccgttccattccttcgggaatcttccagggtgataaggtgaatatcatcggtaacggtgtagtgctcgacccggcgctgttcaaggcggaagcggaagcattggaagcatccggtcataatttgaaggaacgcttgcatatttccaagaaagcacacctcatcttgcccacgcaccgcattctggatgctgcctatgaagctgcaaaaggagatgccaaagtgggaactaccggcaagggcatcggtcctacctatacagacaagattagccgcaacggtgtacgtgtaggtgatatcctgcacgatttcgacaagaagtatgctgctgccaaagcccgtcacgaacaaatcctgaaaggcttgaattacgaatatgatttgagcgagctggaaaaggcatggttcgagggtatcgaatacctgaagcagttcaagtttgtggacagcgaacatgaaataaacggtctgctgtcggacggcaagtctgttttgtgcgaaggtgcgcaaggtacgatgctcgatattgatttcggttcttatccgtttgtcacttcttccaataccatttgtgcaggagcctgcacgggcttgggcatagctcccaataagattggcgaagtgtacggtatcttcaaggcatattgtacgcgtgtaggtgcgggtccgttcccgacggaactgttcgacaagaccggtgaccagatttgtacgctgggacatgaattcggttcggtaaccggacgtaagcgccgttgcggatggattgacctggtagccttgaaatatgccattatggtagacggcgtaaccaagctcatcatgatgaagagcgatgtactcgactcattcgaaacaatcaaagcctgtgtggcatataaggtcaacggtgaggaaatcgattacttcccgttcgatatcgaaggcgtggaaccggtgtacgtggaattgcccggctggcagacggatatgacaaagatgcagagcgaagacgaattccccgaagaattcaacgcttatctgtcgttcctggaagaacagctcggtgtgcctgtgaagattgtatctgtaggtcccgaccgcgaacaaaccatcgaacgctatacggaggaataacatagattgacaaatagacaaccttacgtacgggttacgcggattttgtggtttcgataacggactgtataaattcgggtaacccgtactttttttatttattaccatgaaaacacgtattatctcattattgcttctgctctctctctgctcttccgggaggtcgcaaccttatcagcctacggcagaaaacttgcagtcgcgccaggagttcagggacagcaaattcggcattttcctccattggggactgtattgcatgttggcaaccggagaatggaccatgaccaataataacctgaattataaagaatatgccaaattggcgggcggattttatccttccaggttcaatgcagccaagtgggtggcagctatcaaggcttccggagcaaaatatatttgtttcacttcgcggcatcacgagggcttttccatgtttcatacccgttattccgattataatattgtggatgctactcctttcaggcgggatgtactgaaagaattggcggatgaatgtcataagcaggggattcgcctgcatctgtattattcacatatagactggtatcgagaggatgctccgcaggggcgtacggggcgtggaaccgggcgtccggatccttcgggagactggaacagctattacgcttttatgaacaaccagttgacggagttgctgaccggttacgggaaaataggcgcaatatggttcgacggctggtgggatcaggaccggaatcccggtttcgattggcagttgcccggacaatatgcgttgatacaccgcctgcaacctgcctgtctgattggtaataatcatcaccggacacctttcgagggagaagatatacagatttttgagcgtgatttgcccggtgagaacaaggcgggactttccggacaaggtgtcagtaacttgccattggaaacgtgtgagacaatgaatggcatgtggggatataagattacggaccaaaactataagccggcaaaaactttgattcactatctggtgaaggcagccggtaaggatgccaatctcctgatgaatataggtccgcagcccgatggcgaactgccggctgttgccatggaacgactggcagagataggagagtggatgaaagtgtacggtgaaactatttacggaacacgtggcggctgtgtggctcctcacccttggggagtgacaacgcagaagggaaataagctgtatgtgcatattctggatttgcaggataaagcgcttttcctgcctttggatggaaagcgcgtgaagaaggctgtaggttatactgaccgccggccgctgaaaatacagaaatgccgggatggtgtcatgctttatctttccgaagtcccgacagatattgacaaagtcatcgaactgcacctggaagagtagcctgctgccggtgaattgctaaaactgtaaccgttatgtcggtaaatctttaattcttcctaaaagatagggagaaccgggagatagctcgcagtttccctttatttttggcagacaatttgttatacaaacagaaacgacacattattcatttatttattattaaaagaagaaaattatgggaacaggaatgataggcatgcaatggattatctttatcggggtggctgtggtcagttggctggtacagatgaacctgcagagtaaattcaagaaatattctaaaatccccaccggcaacggaatgacgggagccgatgtggctttgaagatgctgcacgataacggcatctacgatgtaaccgtaacacatactccgggacacttgacagaccattacaaccctgccaataagaccgtaaaccttagcgaaagcgtttataacagcaacagcattatggcagcggccgttgccgcccatgagtgcggacatgccgtgcagcatgcacgcgcctatgcaccgcttacgatgcgcagcaaactggtgcctgtggtttcgtttgcttctaacattatgacgtgggtactgttgggcggtatcctgatgctgaacacttttccacagttgctgctggcaggtatcatcctgtttgccatgactacactgttcagcttcatcacccttccggtggaaatcaatgcgagcaagcgtgcattggtatggttgagcagttccggcattacgaatgcccgcaatcatacacaggcggaagacgcgcttcgttcggcggcttatacgtatgtggtagctgcgctcggttcattggcaacgcttgtttactacataatgatattcatgggacgcagagaataagaacgttctgttccgtagaaatagaaaaatgctttcttcatgctaaatggagaaagcattttttttcttaatcaataaaataccgtaactttgtcatctgattttataaatgattgatacgattatggcagcaaaaccaagtattcccaaaggaacccgcgacttttcgcccgtagaaatggcgaagcgtaactatatattcaatacgattcgtgatgtttatcatctttatggtttccagcagatagagactccttccatggaaatgctttccaccttaatggggaagtatggtgaagaaggcgataaactgttgttcaagatacagaattcgggtgattacttttccggtctgacggacgaggaactgttgagccgtaatgccgcgaagctcgcaagcaagttttgtgagaaaggtctgcgctatgaccttaccgtgccttttgcccgttatgtcgtgatgcacagggatgaaatcacgttccctttcaagcgttaccagattcagccggtgtggcgtgccgaccgtccgcagaaggggcgttatcgtgagttctatcaatgtgatgccgatgtggtaggcagcgactccttgctgaatgaagtggaactgatgcagatagtcgataccgtatttacgcgtttcggcatccgtgtatgcattaaaatcaacaaccgcaagatattgagcggcattgccgagattatcggtgaggctgataagatagtggacattaccgtagcgattgacaagctggacaagatagggctggacaatgtcaacgccgaactgaaagagaagggcatcagtgatgaggctgttgccaaattgcagcctatcattttgttgagcggtagtaacgaagagaaactcgccacactgaagcaggtgctttctgccagcgaagagggcttgaagggtgtggaagagagtgagtttatcttgaagacgctttccgcgcttggattgaagaacgaaattgagcttgacctgacgctggctcgcggcttgaactattatacgggtgctatttttgaagtaaaggcgctggatgtgcagattggcagcattaccggtggcggtcgttatgacaacttgaccggtgtattcggcatggcaggtgtttcgggagtgggcatttcgtttggtgcagaccgcatattcgatgtgctgaaccagcttgaactttatccgaaagaagcggtgaacggtacgcagcttctgtttatcaatttcggtgagaaagaagccgccttctctatgaatgtgcttactcaggtacgtgcggcaggtatccgtgccgaaatcttccccgattccagcaagatgaagaagcagatgggttatgccaactccaagatgattccgtttgttgctttggtgggagaaaacgagatgaatgaaggcaaggtaaccttgaagaatatggagacgggagagcagaaattgattacccccgaagagctggttagcgaactgagttaataaaaactgaaatactattaaaaaggagcctgtttgtgctcctttttttgtatatttgttacgcaggtgttgcaggaatgtaatattcggctcttacctttgcagtgacaataaaagaggaggtttgtatggtttccgttcaatttaaacaagaaaagcataatgcgctggtcagtttcctgatgattgtcatagcggtgttgtttttgctttatatgggcagctcgctggtgaactctacccggactttttgggaaaactattccatagagaatttattggaatgacattctgtaggcagggaacagaaagtcgggttctatccgttttttgcaatatttatccatatcgggaataaataaagacagtcggtttattgcaattggctgtctttttgtatatttgtgagtccgtgttccaaacttttaatacggacatgttttgttaaccgtatcatcaactaaaaacaaccagaatcatggaacaagatttctcaatgcatgccaatccgttggtggccaagcttcaaaaaccggcttccgaatttacaaaagacgacatcgtttcttatataaaggagaatggaatcactatggtgaacttcatgtatcctgctgccgacgggcggttgaaaactttgaactttgtcattaacgatgccgcatatctcgatgcgatacttacgtgcggggagcgtgtggacggttccagcctgtttcctttcattgaagcgggcagcagcgatttatatgtaataccccgcttctgtacggcttttatagatccgtttgccgagcagcctacgctttccatgctctgctctttcttcaataaagacggcgaaccgctggaaagttctcccgaacacactctgcgcaaggcgtgccgggcatttacggaagtaaccggtatggagtttcaggccatgggcgaattggagtattacgtcatttcggaagacagcggcatgttcccggctaccgaccagcgcggttatcacgagtctgctccgtatgccaagttcaatgaattccgtaccgagtgtatggcgtacatcgcacaagccggcggacaaattaagtacgggcattccgaagtgggtaacttcacccttgacggcaagatatacgagcagaatgaaatcgaatttctgccgatacgtgccgagcaggcagccgaccagttgatgattgccaaatggattatccgcaaccttgcttaccagtatggatacgacatcactttcgctccgaaaataacggcaggaaaggccggttccggattgcatatccacatgcgcatcatgaaggacggaaagaatcagatgctgaaagacggcgtactttccgaaacagcccgcaaggcgattgcgggaatgatggagctggctccttccattaccgcattcggcaatacgaatcctacttcttatttccgccttgttcctcatcaggaagcgcctaccaatatctgctggggcgaccgcaaccgttccgtattggtacgtgtgccgttaggatggtcggcaaagaccgatatgtgcatgattgccaatcctctggaagcgccgagcaattacgacaccactcaaaagcagacggtagagatgcgttcaccggacggttcagccgatttgtaccaactgattgcaggactggctgtagcttgccgctgcggttttgagatgccggatgctttggaaattgcggataagacttatgtgaacgtgaatatccacaagaaagaaaacgaagacaaactgaaacaactggctcagttgcccgacagttgtgtcgcttctgccgattgtctggaaaaacagcgtgccgctttcgagaaatacaatgtcttcagtcctgccatgattgacggaattatcactaagttgcgtgcgtatgaggataggactttgcgtagcgaagtgcaggatagtccggaagagatgctgaaactggttgagaagtatttccattgcgggtaacggacagaacagatattatagtaaagaactccttgccggacggttgccggtgaggagttcttgttttatagccggtcacctttgccattttgtcagcatttatctgccaaacgaacagctttgccttttggcacggttttcgtaagttctttatcgcttgtataaagcaacattaccattataataaattgtataacatataaaacaaaaaaactatgaacattaaaccattagcagacagagtgctgatactccctgcacctgcagaagaaaagacaatcggcggtatcattattcctgatacggcaaaagaaaaacctttgaaaggtgaagttatcgcagtaggcaacggaactaaggacgaagaaatggtgttgaaggttggtgatacggtactgtatggcaaatatgccggtacggaactggaagtggaaggaaccaagtacctcatcatgcgtcaaagcgacgtactcgctgttttgggataatcaatttataaatagtaaacctgataaatagtaaaaacattatggcaaaagaaatattattcaatatcgatgcccgcgaccaactgaagaaaggtatcgatacactggcaaatgcagtaaaagtaacgctcggcccgaaaggacgtaacgtaatcatcgaaaagaaattcggcgctccccacatcacaaaggacggtgtaacagtagccaaagaagtggaactggccgatgcttaccagaataccggtgcacaactggttaaggaagttgcttccaagacaggtgacgatgctggtgacggtacaactaccgctaccgtattggctcaggctatcgtagccgaaggcttgaagaacgtaactgccggtgcaagcccgatggatatcaaacgcggtatcgacaaggctgttgccaaagtggttgagtccatcaagagccaggccgagatggtaggtgacaactatgataagattgaacaggtaggtacggtatctgccaacaacgacccggttatcggtaagttgattgcagacgctatgcgtaaggtttccaaagacggtgttatcactatcgaagaggctaagggtacggataccactatcggtgtagtagaaggtatgcagttcgaccgcggttatctttctgcttatttcgttaccaacactgaaaagatggaatgcgaaatggagaaaccgtacatcctgatttacgataagaagatttccaacctgaaagatttcctgcctatcctcgaaccggctgtacagactggccgtcctctgttggtaattgcagaagatgtggatagcgaagctctgactaccttggttgtgaaccgtctgcgttctcagttgaagatatgtgctgtgaaggctccgggcttcggcgaccgccgcaaggaaatgctggaagacattgccgtattgacaggcggtgttgtaatcagcgaagaaaaaggcttgaaactggaacaggctactatcgaaatgttgggtactgccgacaaggtaactgtttctaaagacaatacgactatcgtgaacggtgccggtgcaaaagaaaacatcaaggagcgttgcgaacaaatcaaggctcagattgcttctaccaagtccgactatgacaaggagaaattgcaggaacgtcttgccaagttgtcaggcggtgtggctgttctttacgtaggtgctgcttccgaagtggaaatgaaagagaagaaagaccgtgtagacgatgctctccgcgctactcgtgccgctatcgaagaaggtatcgtagcaggtggcggtgtggcttacatccgtgcgctcgaagcattggaaggtttgaagggtgacaatgccgacgaaactaccggtatcgacatcatcaaacgtgccatcgaagagcctttgcgccagattgtagccaacgccggtaaggaaggcgctgttgtagtacagaaagttcgtgaaggcaaagccgacttcggttacaatgcacgtaccgatgtttacgaaaacctgcacgctgccggtgtggtagaccctgcaaaggttactcgtgtggctctggaaaatgccgcttctatcgcaggtatgttccttactaccgaatgtgtgattgtcgagaagaaagaagataagcccgaaatgccgatgggtgctccaggaatgggcggtatgggcggaatgatgtaatatcgttttcccttgatttcttaatcatataaattgaccgcgatgtcttgcataaaggcgtcgcggtttttttatgttggataatattgtttcctttgcatattcatttcgataataaaatagaaaagaccatgagaagttttgcttcagataataattcgggggtgcatcctttggtaatggaagcgctgaatagggccaattgggaccatgcagtgggatatggtgatgatgtatggacggaagaggctgtctgcaaaatcagggaagcttttactccggattgcgaaccgttgtttgtattcaatggaaccggcagcaatactgttgccttacagttatgcacgcgtccttataattcggtaatatgtgcggaaactgcgcatatttatgtagatgaatgcggcgctcctgcccgcatgacaggctgtcagattcgtccggttgccactcccgacggaaagctgactcctgagctggtacgtccttatctttgtcatttcggcgagcagcatcattcccagccgggaactttttatatctcgcaatgtacggagctgggcactgtctaccggcccgatgaaatccgtgcgttgacggaactggcacaccggcacggcatgtacgtccatatggacggcgcccgtctggcaaatgcctgtgcggcccttaactttagtttcaggcagctgacggtagattgcggcattgatattcttagttttggcggaacgaaaaacgggttgatgcttggcgaaagtgtaattatctttaatccggctttaaagaaagaggcttgttttgtacgcaagcagtcggcacagctcgcatcgaaactccgttacctgtcctgtcagtttactgcttatctcacggacgacctttggttgaagaacgcttcacacgccaatcgtatggcgcagcttttatatgccggattgaaggagttgcccggagtacgttttacgcagaaagtggaaagtaaccaactgttcctgacaatgccccgtccggtaattgacaacttgttgaaagactacttcttctacttctggaatgaagaagagaatgagatacgtttcgttacctcttttgacactacggaacaggatatagaagaactgctacgcgccattagacgttattgtcattaagcggtattcatgttttgccatataaaaaaagcccccgaaccttcacaggcaaggggcttgacttagacctttccctctttttagggggtgagggaaaggcttactgaaaacaaacagatttactttaccttaaaatacctttgattgataaccttttaactaaccttctttataatgctgaatttgtcttaatacctattgcttcgagtatgggggtaaaggtataacctttacgtttcaatgtttttatcaatttatccaaatagctgttgtaaaatttatccgtacggcggttgtctgttccgaagtgtatcagcatcaaatgtccgttcaggccctctttcttctctacttccatgattttgttgtagatgaacttgctgctccggtatttctgtcccatatcgggggtggtataatctgcattgctcatggttccgggagtatagttgacgacttgtattcccatattttttgcccaggcggctatctccttgttataatattcatagggcggaatgtatatcggggcgtctttatattcaataccggccttgcgcatggtttcgtagcttttcagcatgtccttttcaaattcctcgcgggtaaccaataaggaatcgcggttctcccacggcatatagagcagatgtccgtagctatggctgcctaccagatgtccttcatcgagcaatcgttttactatttcggggtaaagctcgtaaaattcgccggtaaagaagaagcttcctttgataccgtgccttttcagggtactgataatggcatccgcgccgtcagccttgtcggctgctgtgaatacgaggctgatttgttttttagacgggtcggtacgcacgataccgccattgacgtatacatttttgtctgccgatgcacctgcctgtttcatgccttctttctgcatggcagagagataataggtgaggcaggcggttccgtccatggtcggttcattggtggaatagtcgtggagtgcatcgtggtataccatcagctccggttgaaagcgttcgtaatcctgtccgggcgtaccgggaatgccggtcatgtttacccctcgcagcccctcgaatatgctgcggtatacggggccgtccaccagtccgcctgtcgtattgcctacgcctgcattgagcagggaggagtggggttgcgaaggataatcgccgtaaagcggcagttccacaatcatgcttgttccccacggattgcagccgaacagccagtcgcggagggctgcttccatttcggcataagtttcatcgtcggttgtctcgcggtagagacggcattgcgtcaacatggcagtagtcaggttgttggaacaccagatgtagggaataccgtgcaggaaaggactttcgactgctttctcgtatgtgcgctcaatgccggtgcgcatgttgcggatgaactctttgctgatgcgcgggttgtttacagtggccaggtggtagtgtcccatgttcatgaacggataccattggtaatggcgggcgctgtcggcacccatccacggagtgacgggctcgcggcgtccgtattcgagggcttgcgacaggtattccggcttgccggtagcattgtatagctccatggctccgagttccatatcgtccgtccagttgtcttcttcatagatgtagggtgattttacggaggcggtctggcatgttcccggcttctttacaccttcctgataggcggcatcggctttttcaccgatttcagcggcaaattcggggtaaaactctttcagtattctggctcccagtgcaaaacaagcggcaaacttgccggctgtacttgctacgccggtggtggcattggtgaattttccgcgcacttgcggctctccgctgcaaaagtaaacggggcgtcctttgcccggtccgtagccataatccacctcatctttattgggcaggcgcatgccggcgtggtcgcggtcgtcggcaatctggttgtacagttcgcccggagcgggattcatgcggttcagccagtccagtccccattttatttcgtctactatatcgggaatgccgtttgcttccggcagtccggctgcattgtaggcatcgccgaatgcctcggggttttcctggtaggcaaacatcatttggtatatggcattggcggaagtcgtggtatattgcaggtagtcggtagcatcgtgccagccgccgcgcacatcgatgtgttgcccggtttttgtggggtggtacgctatgtagccgtcgtgtacgtggcagctgtctttcaagaaagggttgtaaccgcaacgttgctggcgcatgtagttcagcaggaagtcggctgtgccgttatatacctgcgcattgatagggaagcgtggagaaacagcttttcccgctttcaggtaatatgtgcccggttcttgaaaattactgaaatccaaccggtaagtactgctcatgctgcctgattggccggtggctttgggcgaagtaaaagtgcgtaccgtttttccggtaaaagcatcgaccagtgcgtattcttgtacgtcggtttttgtttcgctcatgaataccgctactttaatggattgtggcagatagcccagttggttgattctaatccattcgtccgccttacacgggagtgcggcaaatgcaaaaatcagtgttaagagccgataataacgtttcataaaatgcttttcatttaaggttgtgggggtactatgtaacaaaaggttttacctaaatgcaaataaagcggtttctatcaattttaggaagatttggtgtaaattattagatgatattatttgtcatttacaatattttagaatgatgcaaaaagtatggtattagtagttttggcaataaactcttgcttatcatatgtttatgtgatattgaatatctttttagctttcgtttacgcattttaatttcttaaaaacaatgttggtgtgttatttgttctatccattttagaatacaaaacttataaactatggcttacattgattattatcaagtccttggagtagacaaaacggcatctcaggatgacatcaagaaggcgttccgtaagttggcgcgcaaatatcatcccgacctgaatccgaatgacgctactgccaaagacaagtttcaggctatcaacgaggccaatgaggtgcttagtgatcctgagaaaagaaagaagtatgatgaatatggcgaacactggaagcatgccgatgaatttgaggctcagaagcgggcacggcaacaggccggtgcaggaggcttcggcggcttcggcggtgcgggcttcggtggtcagggtggtgccggtttcggtacggatgggggcggtacatactggtactcttccgatgggcaggagttttccggaagcggtgcagacggcttctccgatttctttgaacagatgttcggacaccgtacacgcggcggtggcggagcgaatgcaggttttcgcggacaggacttccatgccgatttgaacctgtcgcttcgggatgccgcccggactcataagcagatattgacggtgaacggcaagaatgtccgcattaccattcccgccggtgtggcgaacggtcaggtcattaaactgaaaggctatggcggcgagggtatcaacggcgggcctgcgggcgacctgtacattactttcgtgatagcggaagatcccgtcttcaaacgcttgggcgatgatttgtatgtagatgtggacatcgacctctatacggcattgctggggggcgagaagttggtggacacattggaaggtcaggtgaaactgaaagtaaaacccgaaacgcagaacggtacgaaagtccgtctgaaagggaagggttttccggtatacaagaaagaaggccagtccggtgacttgattgtgacttattccgtaaagttgccggtgaatctgacggaacagcagaaagaaatgttccgtaaaattcaaagtatgaactaaaaaggagaacgagttatgcagaacgaattaattatagtcagtgagtattgcgacaagtgtcatatagagccctcgttcattgagatgttacaggaaatcggtctgatagatatccggacggaaggcggggagcgttgtttgcagtttgcccagttgccggatgtggaacgttacagccgtatgtattacgacctgtccatcaacatcgaaggcattgatgccattcatcatttgctggagcgtatggaaagtatgcagcaggagatttattctttacatagcaggttgaggctgtttgaggatgtgtcaagatgatttagtattttctttcaggcatagattatacggatttcattatttctgtttataaaaaacatgaaatccgtatagtttgtgcctgaagatttattatcatgtaaacactcgcgtacatttatcaagttgtatgttatgttggatgattactgctaaacagcaagtgtatattccagcatatatttgcatttggacggcattttcggttgttctcagaatcctttgtatgatctttacatataaggattttacttgtttttgtcgggaaaatatcaaattataatagtagtatgtttagtttgttcaaaaaataatatatattagcctgataaaatatcttttacgtggtattattaacaataaacaaacagacatattaaagatgaaaataaaatccaaataagtacaagcaaataggctttatatcagacatttataaagaaatcgtttctttcagtttttttcgctattttctgttaattagttctttttgggtacatttttgttccttgtttgtttcttgatttcggttttaattcgtacatttgcatacgaaaaagaacgaatgaaagaatacgattatgccacgaataaagaagcctaaaaaagtaaaagagcccatccgtcttcggatgaaggatttgtccgatggcagcaaaagtctgtatctggatatataccgcaatggcaagcggacatatgagtacctgaagctgtatcttatcccgggaacggacaacaatacccgtcggcagaatgaaataacaatggccgctgcgaatgccatcaagtcgaaacgcattatcgaactgaccagcggcgaagccggtatcgtgaaccatacagataaggtttatctgctggactggatgcaaacctatttggagtaccaagagaaacgcgacaagaaaggcatcggtcaaatcaaggccgttacccatatcctgaaagaatatgcaggggaaaggtttttgttggatcgggttgacctcgctttttgccaaggctatatcgactacatgctgacgaccttccgccctaaaggaaagccgatagcagcatctacacgcaatacctattatcagatattcaacggtgccctgaacactgccgtccgggctaaacggttgttgagaaatccgtttaatgaaatggaaaaatcggagaagcccaaaatgccggagagcgtgcggtcctatatgaccatcgaagaggtacgggcgttgattgccactccggtacaggatgggagggttaaaaacgcctatctgttttcctgcttctgcggactgcgtatcagcgatattgtcggcctgaaatggaagaatgtctttgtcgataacggccaataccgtctggcggtggctatgcagaagaccaaagaaccgatttacctgccactctccaacgaggcgttgaagtggatgccggagcgtgaggacaaggcggcggatgaccatgtgttcagcttgccttcaaacatcaaccagtatctcaagccgtgggccgaagcggccggaatcaccaagcgttttacttttcacacggcccggcacacattcgcgaccatgatgctgacgctcggtgcggatctctataccgtatcgaagctgcttggtcatacctccgtgagaatgacacaggtgtacgccaaaatcatcaaccagaaaaaagacgaagcagtcaatttggtcaacgggctattcgactgatgtagttatacatgtcaaattcaatttacaggtaaatatttccggcttttctccgacttttcaaatagtcgaagtaatgccactattataataagtataaacccataaaaacaattcgacatgaaaggacaaaacaacaggtcctctctttttttgaagggagaccacatctgcaccacttcgctacggaacaggatgtagcggaagaattttacgaattgctctccgaagcgagggagctttatcttcaagacgtcatggcaggcggcaaacggtatggccgctatgtggatgactttataaacagtcaccggtacatcgactgcaacagtgcggtttgcaggaattgccatgaaatgaacatccatatcatcagagggctgttgatcgattgcacaagtctcgtcaaaagcctctttaccgcagaaacattttctttcgaggagtgcatggccttgaaacgaaagtacgacattgccggagtatggttcggctcttcacgtatagaagattccagaaacgatccacctctctccttcggttgtaatttttcccgtgaacagatgacaggtattgtggcttgcgccaacgcttatcatctgttttgcgtttccacactccgcatcgaggacatggaagcgctttttgcctgcaagaagggcttctgcatacgtgtgaacaatatccgccatgtggcggtcctgttcgacgcgttgctcgaaaacaccttcatcctgcctcactggcagtcggttctcgacaaggggcggttcctgttgtccaaagacggcacaagatacgttaccgcttcaagcctctcgtccgccctgtctgcggcgaggaacaacattacatcggcaaacctcggcatacgaaaagccgtcagccgactgaaaatatgacacgaagtgccaaaaagccaagtatgtgaaagataaaacagtgacagttgccgtgatacgtgcatagtatcacgccggtatttccggctgtccggttcacatcacataactttgacctccgttagcgcgctgcataacggaggtaactctccattgtctaattttaacatgtattttatgcaaaacagaacaacattcatggagcggttgagcgaacggctgaccgccatagaagcggttctcaagaagttggaaccggtggaaggtctgttggagcgtgtggctttgctggaaaataccatttacacgaccaagaaggtcttcacttttcaagaggcgtgcatgtatatcggcgtgtccgaaagtatgttgtacaaactcacatcgaacaaggaaatcccgcactacaagcctcgcggcaagatgctctactttgcgaaggaagagctggacgcgtggctcttgcaaaactacgaacctacggtggacgatgccatgcgtatggcgacggaagtgtccgcaacccaaccgttctttaaccagaagcgctatggaaaacgaaaaaagaactgaccgtaactcgtgggcggagctggacgagaaccgcctgtcggatatcctcactgcatcgcaaataaaggccacggacacctacgagactccgccccagattatatggattgacaactccaccatagcgacgctcggtaatttcagcgcttcgacgggtaaggcgaaggcgaaaaagacgttcaacgtctcggccatcgtcgccgcgtcgctggcgggccggcaggtcttgaactatcgggcgcacctgcccgaaggcaaacgcaggattctgtacgtggacactgaacagagccgtttccattgccacaacgtattggaacgcattctccgcctggcggggctgcccaccacgacggacaacgagaatctcgatttcatttgcctgcgggaatacactcctgccgtccgtatcggggttatcgactatgccctgcgtcagaacaaggggtatgggctggtcatcatagacggcatccgcgacctgatgctcgacatcaacagcaccagcgaatcggtggaggtcatcaacaagatgatggagtggtcgtcgaaatacgacctgcacatccattgtgtgctacacctgaacaagggcgacaacaatgtgcgcgggcatatcggtacggaaatgagcaataaggcggaaacggtgctggtcatcaccaaaagtgcggagaatcccgttatcagtgaagttcatgcgctgcatatccgcgagaaggagttcaaaccgttcgccttttccgttgatgacgaagggttgccggtcatggtggataactattcgtttgacggcagtgtaagaccgaaagcccggagcagcttcatggatttgtccatcgaacagcaccgggaggcactttccgccgctttcggggacaggcccatcaaaggtttcgagaacgtgctgcaggccctcatggcttcctatgaggctatcgggttcaaacggggacgcagcgtcatgataaaactgctgcaatacctgacggaaaacctgaagctgatcgtcaaacgggacaagctcttttattacgatgtgaccccgaccgaagccctgcttttcgacgaagaatgcgaggaagcggaaggtgaaaaataatttagtttactttggtccgggtatatataggagaaaaaccaaagtaaactgttttttgaaaacaagtgaaaagaaaatgacatgaccatagcggaagcaaaacaactgcgtatcgtggactatctcgccagtctcggctaccatccccagagtgtgatatcaaaacaatactggtatctgtcaccgctgcgcgatgaacgcactccgtcgttcaaggtcaacgaccggctcaacgaatggtatgactttggcgcagcgacgggcggcgaccttgtggaactgggcaaatacctgtaccggacgaacagcgtgagcgaagtgcttgcctgtatcgggagacatgaaaatgctgccccgatacaaagagtgcggattccggggacaacaccccgtcccgtcgaagctgacatgaaggacgtgctcgtcgtgccgttgcagcaccatgcgctactctcgtaccttcattcccgtggaatcgacggggacatcggccgcatgttctgccgggaggtccattatgaattacgtaaacggcgctacttcgctcttgccttcggcaacgcggcgggcgggtacgaggtgcgcaatccttattataagggctgtatccggtgtaaggacatctctgtcatcaggcaatctcatggtgaaacacagaaccgtgtttgcgtgttcgagggcttcatggattttctctcttacctgacgctgaaacaggcgggtgatgatacggtctgcatcgacgcaccttgtgattacctcgtgatgaactcggtgaacaacctgaaaaaagcattggaacacttgcaggtgtacgaggaaatccactgttatctcgacaatgatctcgcagggcagaaaacggaagagaccatcgccggcatgtatggcgggcgtgtacgcaacgaagcaccccgttatcgcgaatacaaggacctgaacgattacctacgcggaaagaaacggtaaggcatcatcgttaccctttcccttgaaagctctcctcccggagggctttttttatgcccgatttttctgcttcgatacctcaaagtatgaaattaaagttcaattttagtgtttcaaacttatttctatgtaataaaatactgtttgatataaagagtttttgttacatcaaatataatatttttctttgcaaccgtacttttaaagttcaattaaagtttaatttcatacttaaaaacagatgggttcatactttatattcgcccttgtactgacggtgctgtacatcgtctatttcgcggtcaatatcatccgtgacctgtatggaaagaagggaacggagaagactgacgaggaagttttcgacctcggtccgatggattccacggaagagagtgtcgaggtttcggagaacgagaccgggttcaaaatcggaaatgaaacatacggcacggagactgtacctgccgcttcgcctgccgcccaaaacggcgacaccgggaaaaaagatggaacagccaaggatcggctcgaacggctgaaagccaaggcagaggcacagatggaaaaggtcgcaccctacctgtccgacggctttaccgacgaagagatgtataaggcaatgatttccaaaggacgcttggacaaccgtcccagcctgaaatggagaccggtcaaagataagctgtaagatgtcgaaaacgaagaagatactatgtgcgctttgttccatcatcccctgttcggctctggcgaaaagcggcagcgtgaattacagttggggggcggatgcgctggcgacgatgcacgactacgtggtaacgatgatgttctacgtccaagctctctgttgtgccatcgccgggatttgtgtgattgtgtccggattccagatttacgtaaagatgaacacgggcgaggacggtattaccaagtccgtcgtaacgcttgtgggcgcgtgcctgttcctgatcggtgccttccttgtctttcctgcctttttcggctatcgcatatagaaacgggatgcaggaatgaggtgccgccataacgattcgaaagaactgcaatacttaccctaaaataaataatcatgtttcaaaaaacaaaaagacaaatgaaaagaatgttttctgctaaaaaggtacagatgctcacactgatgttgctgtgtggcacgacggccgtcatggcccaaaactccgcaggcgattactccgccggtacgaccgcactggcgaccgtgacggaggaaatcgccaagtacgtccccgtcatggtcaaactgtgttacgccattgccggtgtagtggctatcgtaggcgctatctcggtgtacatcgccatgaacaacgaggaacaggacgtgaagaaaaagattatgatgatcgttggcgcatgtattttcttaatcgctgccgcacaagcacttccgatgttcttcggtatcggcgcataaccctcccgcacgatgaaaggcaaggacgaacgctatcccgactacccgctgttcaagggcctgcaacggcctttggagttcatgggtattcagggacgctacatctactgggcggcgggcgttgccggcggagccatcgtcggatttatcatcgcctactgcctcgtgggtttcgtggccggactggtcgtgctggttgcggtcgtctcgacgggtattgcgcttatcatgctcaaacagcggaaagggctgcataccaagaaagacggtcgcggagtgtatatctacgcccactcgaagaaactgtgagaagaaaagaaaaaccatcacgggcaacgtgtggtcttgttgaatgttgaacgcgggccggccgcctgaaatccgggtggaccggccttttttattgtattttgaaatgaccttgtacatcattctactttttatcgccttgtgtgccggcatggccctgtcggtctatgcgttcggtaccggaggcaagcgtaagcgtatctttcaggacatctatttttctgtggaagatacgaacggcgtgggcgtgctgtacaccaagacgggcgaatattcagccatcctgaaaatagagaatcccgtgcagaaatactgtgcgaacatcgacagctactacgagttcacgcaccttttcaccgccctcgcgcagacgctcggcgaaggatatgccctgcacaaacaggacatcttcatccggaaacagttcgagaacgagacgggggacaaacacgagttcctctcatcggcctacttccgttacttcaaggggcgtaactatacggacagcgtgtgttacctgaccatcacgcaggaggcgaagaagagccgcctgttctcgttcgacaacaagaagtggcgcgactttctggtcaagatacgcaaagtgcatgaccagctgcacgatgccggggtacaggccaggttcctgaacaaagccgaagcgagcgaatacgtggaccgctatttcgccatgaacttcaaggagcggatcgtgtcgatgaccaacttcaaggcggacgacgaaacggtctcgatgggcgacaaacgctgcaaggtatatagccttgtcgatgtggactgtgccgcactgccctcactgatacggccttacaccaatatagaggtcaataacacggatatgcccgtggacctgctggctgccatcgacaacattccgaatgcggagacggtcgtctataaccagattgtcttcctgcccaaccagaaaagggaactggccctgctggacaaaaagaagaaccggcacgccagtattcccaatccgagcaaccagatggccgtggaggacatcaagcgggtgcaggaggtcatcgcgcgggaaagcaagcagctcgtgtacacccatttcaacctgatcgtcgccgtaccggccgatacggacctgcaaaaatgcacgaaccacttggagaatgctttcggacgtatgggtatccatatttccaaaagggcgtacaaccaactggaactgttcgtgaactcgtttccgggtaactgttacggcatgaacgaggactatgaccgcttcctgacgctgggtgacgcggcgatgtgtctgatgtataaggagcacatacagcacagcgaggagacaccgctgaaaatctactacacagaccgccaaggcgtgccggtggctatcgacatcacgggaaaggaggggaaaaacaagctgacggacaactcgaactttttctgtctcggtccttcgggcagcggcaagagcttccacatgaactctgtcgtgcgccagttgtacgagcaaggaacggacgtggtgatggtcgatacgggtaacagctacgagggactttgcgaatacctcggcggcaagtacatttcctataccgaggaaagaccgattacgatgaacccattccgcatcaatcgggcggaaatgaatgtggagaagacgggcttcctgaaaaacctcgtgctgctcatctggaaaggctcgcagggtacggtcacaaagacagaggaccgcctgatagaacaggtcatcacggagtattacgacacttatttcaatgggttcgacggcttcacacccctgcaacgggaggatttgcgtaaggggctgctcatcgacgaccgtaaccatgccgagaagcaggacgaggacgaaggagagcggaccgggcgtatcgagcgcatgatcgacgagatggaacgccgccgtaaggagttgaaagtggaagagctgtcgttcaactcgttctatgaattttccgtgcagcgcatccccgacatctgtgccgaaaaccatatttcgggcatcgacatatcgacgtaccgttacatgatgaaggacttctatcggggcggcaatcatgaaaagacgctgaacgagaacatggacagttcattgttcgatgagacgttcatcgtcttcgaaattgacagtataaaggatgatcctctcctgttccctcttgtcacactgattatcatggatgtattcttacagaagatgcgtatcaagaagaaccgcaaagtcctggtcatagaggaagcgtggaaggccattgccagcccgctcatggccgaatacatcaagtttatgtacaagacggcccgtaagttctgggcctcggtcggcgtggtgacgcaggagatacaggacatcatcggcagccctatcgtcaaggaagccatcatcaacaactccgacgtggtgatgctgcttgaccagagcaagttccgcgagcggttcgatgaaatcaaggctattctcggacttaccgacgtggactgcaaaaagatattcaccatcaaccggctggaaaacaaggaagggcgcagcttcttccgagaggtgttcatccgccgggggacgaccagcggcgtgtacggcgtggaagaaccaagagagtgttacatgacctacaccaccgagcgggcggagaaagaagccctgaaactctacaagcgggaattgcggtgcagccatcaggaagctatcgaggcgtactgtcgggattggaacgccagcggtatcggaaaatccctgccgttcgcccaaaaggtcaacgaggccgggcggatattgaaccttcatgtaaaacaataacaatcaaatcatcaattacagaaaatggaaaagatagacatcagccaaagcgtgaagacacttgagttcgggagcaaatatgaagcccgtatccaacggatattccgtgagttcgacatcaaaaccatccgggatttgtgccaatggcccggaaaggacttggtaagggtacgcgacatgggaagaaaaagcatcgaggaaatagaggatgttctggaaaggtacaatctccggttgggaatgcccggtaaggaactggacgaatacgccggtatcggaaattccgtgcaggacgaggaagaagaggcgaagtgggaacaacgcaggtacgagatagccaaggaggtattcatacaccaccgtctggtggcaaattccgccgtatatgaggccgacgaactgatacgtgcactaagaggcatgacgcgccgttgacgggggctgtttttaaccggggaggaatccatgatgaaacggctgtcacttatccttatgctcctgtcgctcgttgtcgtacagcacatccacgcgcagtattacagcgtgaactacgatgcgcgtaccgtggcggcaatggctaccgctttcggtacggaagccgtggcggaaagctattaccgggagcaggtcgatgacatactcaagcactacaatgcggcggaagtggccacggcggggatttttgcctccaagttcttggagcataaagccttttccgacctcggtatctggaacagcagtacggagaactactactaccgccgcatttaccgcatggtctcggagaagatcatacccaagatatgggtggtggcgaaactgatgctccgctcaccgcaaacggctatctactggggcagctacctgatgaaaatctgcgacgaaacgaaaagcctgtgtatgcagttcgagagtgtagtgacgaacagcacgttgggcttttcggacatcgtgtttctggaaatcaaccggaacatcgcccctctgttgaaactctcggagataggcgacatcgactggcagcacatgctggacgacatcgccagcgtgccgggcaatttcaccaaggagaacctgcaacacgacatcgacaacctctacaacatgggtgtcggtctcgcctcggcaggtatcgggaacattggtgacgccctgttgcaaaccagttcgttccatgagctgatgggcggcagggtcagcaaggtcatcgacctgtatgaccattacggtgcgctcttcgagcaggcggagcatgacctcggcggcctgctgattgacatggtgggcggtgaggacaacgtggcgggactgttcgatttcagcaactacgaccttacctcctggatgacggactatctggacgagacggcgggaaactactacacgcaacggtggtatatcgcccggcgtgagcaagggagtatcgccttgtgcgactactacccgccgacggacgataacagcatactgaacggcggcgaatggacgcgtttcgagacaaccgatcccgacttttatcccaatgcctcgcaacgggagcaggcgctcgccaattcggaacggtacgccggttggtcgagaagccgggtacagcagctcaacaaccagaatgacggctatacctatagtatcaactactggcagaacggctatatcatcagccggggcggcaaacagacgaagaaggcatacgcctacgaaatccatgtgaagaaaagctggaaccgggaagaggtcgtctatgaagaggtgttcgattcctactcgatggacctgaacacgttcaaagccgggcttaacgcccgactctcggagttcaacgacaacgaggaaggttatacctattatatagcttctgacgcgcggaactattatcaggcgacggacgccgcgaaattgcaaggctgcgagagcgtgaccatcagtgtaacctgttcggacggggctacgctcggtcagggcacgacgcagtacaagtgccgaacgtgcggcaaatccctgaacgcccattcaaaggagtgtgccatgcagaccacggttacggagaacgaactggacttgtccgagctggacgccatgctgcaggaggcagagaatcaggtagccgccatccagtcgcaaatcaacgcgttggagagcgagaatgccgacctgctgaaaaaaatcgccgaggcaagcgtggaagatgcggcggtgtaccggcagcagtacaacgcgaacaagacacagatagaccgcctgaaaagcgagctgtccgaatggcagaagaaacaacgggaatacaccgacgcgaaaaccgaggcgtcgggcgataacgatgtggcaacagacgactattaccgcataccggccatcatgcaggactgcaagacggcttacagcctgtcgtggcaggacggcggggcgtggaacggctacacctatgtccgtaaggcgaccatgccgaacatcaacggggtcatcacgttcaaggcgacggtctcgatagcccgcaaaccgaaatatttcctcggtatcaagatacaccgtgccatcgtgcagatcagttgggaactgaccacggaatacaccgacacgtatgtggccgacgtgctgacgctcgaccctaacctgtcggacgcggagaaaacgaaactggtgaacgaccgtattgcggagattgcacgagagcatccttcgtgcaagatcacgacggaatatgcccgtaccccaccattggaagagactccgaccggggaggtgtaccatctgctgtggtcaagcgaccggctcgaaatcgcacgggaagtggattcccggattacgatgatatatgccgacctcgtgtcactggagaagatgatgcactacaaacggagcatcatcgacgtgctgaaggacgtgctgcccgaattggatatggacgagggacgcaggctgacgctcgtggaggaatgccacgaacgctgggtggagaatgcgcggaacctgcggagcggaaacggcaggaacggcaaaggcagcggaaaggaggtgcggccatgaaacgtgccctgctgatggcagtcgtgctgctggctctcctgcccggcattgccaaggcgcaatggacgttcgacatcgtgtcggtagaagcctacatcaacgaccacaagaagcaacgcagcctgctgctggcccgcagtacgctggaatacagcaacaagctgctgcacgagtacagccgcaaagaggtcggcgagtacaaggaactgaatgtggacttggaccgctacacccgtgccttcgacgtcatcgacgtgatgtaccagtccttgcggacggtgctgaacgtgaaaagcacctatacggcggtcagcgaccgtatcggcgattacaagagactgctggaggacttcaacgatagaatcgtgaaacgggggcgcatcgaccccggcgatgccgtgatactggccatcaacgaaaaggcaatacgggacatcgccgatgacgggaaacagctttacaaatcggtcagtgacctcgtgctgtatgccacaggggcggcagaatgttcgacctccgacctgctgatggtgctggaagcggtgaacacgtcgctggacgacatcgagcggcacctgaaccgggcgtatatcgagacgtggcggtacatacaggtgcgcatcggttactggaaagcgaagatttaccgtcccaaggtcaaggagattatcgacggggctttcggacgatggcgcaaagcgggacggctggattattaacgaacgataaaagggaaagaaggcaaactatctacaggttagagtttgacttccatgccatcgacatcgggaaataaaaacagagaaagaatttttagtacaaacaagcctattgggattataccaagggataaaaagacattcagattgatgcaatggaaaagattgtttttgcaaaagacattacgttatataaggccgattgtcttgaagtgatgccttttcttccggaatcaagcattgatttggttttatgcgatcccccttttggaattacagcttcacagtgggataaaataataccattcccggaaatgtggaaagagatcaggagagtcaggaaagaaaatgcacctacggtcttatttggcagcgaaccgttcagcagctttctacgctgcggcaatttagatgaatttaaatatgactgggtttgggaaaagtcaaaagcaagcaattttcttctcgctaaaaaacaacctctaaaagcacatgagctaataagtgtctttggcaaaggcagaaccccttattatccaatcatggaggaaggcgagccttacgggaaccgcacgaagagaggaagcaattggacagggataaacaatgtacccaatcctacattcaggcatgaaaacaaagggacaagatatccacgaagtgtgatatacttcaaaacagcggaatcggaaggcaaaacgattcatgtcaaccaaaagccgattgcattattggagtatctgataaaaacatacacaaaggaaggagatactgtccttgattttgcttcggggagcatgagcaccgcaattgcctgtatctatacgaatagaaaatgtatttgcattgaaaaagacgagacatatttctcgcaaggagagaaacgagtcaggaatgaataccaatatttatgacagtaaaggaagctcaaaaaaagtatgactatacgatataaataactgtaaaataatgaataaccggaaattaatatgaacagaactctcttactcatggcggttgcagcagttgcaacgagcggtgtcaaggcgcagtcggttacttacaaccatgactcgccgaaacagaaccagattacggttatggaaaccggtacgggcgctctgtcgcccgaactttattacacgctgctgcacaacaagtacaagaagtcggcggcaagcaagaacaaactgtcgttccgcacgctggcgggtgtgaacctgtacaaccagacagacgaggcggaagccatcgactcggcactggtcaagcgggccgaaatcgaggcactgaatgtagccgaccggcagattgacctcgcgtggctggccgagggcgataagataaacgctcaaatggaacggcttcagcgcaacatcgaccgcatcccccttgccgggggcacaacggacgacagggagcggtggacggaatactaccacgtctaccagtgcgccattgacgctacgaaggacgcctacatgcccaacgcacaacggaagaaagagtacctgcgaatctacgaggacgtggtacggcagaacgagattctggtcggctaccttgcccgaagacagaacgccacggttgcgaacgggctgctgaatgcaaccgccgaccggagactggacaagggcggtatcgtccgcgaggcgatgggccggtggaacgaatcgcgttccgccgtgcgaggggcgcaatcgggcggcgaaactgatacgggagacggagacgagacggtaaacagaaagaactaaaaacacacaacgtatggcagacggaaatattctttcggatttcggtatcgacctcttggaagaggaaatcgacgacgtgatttttcagaccaacgagtttctgaccgatgcgacctttaccggctcgcaaggtcccttctggtggattcttcaaatgtgcatggcactggccgccctattcgccatcatcatggcggcaggcatggcgtacaaaatgatggtcaagcacgagcctttggacgtgatgaagctcttcagaccgctggccgtgtcgcttatcctctgctggtggtatcctccggcagacacgggcatggcaaacagcgggagcaactggtgctttttagatttcctctcctatatcccgaactgcgtcggttcgtacacacatgacctgtacgaggccgaagcctcgcaaatctcggacaagttcgaggaagtgcaggagttgatttacgtgcgcgacacgatgtacactgccctgcaggcacaggccgatgtcgcccatacgggtacgtcggacccaaaccttatcgaggcaacgatggaacagacaggtgtggacgaggtaacgaacatggagaaggatgcggcgaagctgtggttcacctcgctgacttcgggggtaatcgtggggattgacaaaatcatcatgctgatagcccttgtagtattcagaatcggttggtgggcgaccatctattgtcagcaaattcttttgggaatgctcaccattttcggacctatccaatgggcgttctcgctcctacccaagtgggaaggcgcatgggcgaagtggctcacaaggtatctgacggtgcatttctatggtgcgatgctctacttcgtgggcttctacgtgctgctgctgttcgacatcgtactttgcatacaggtagagaacctaacggcgataacggcaagcgagcagacgatggcggcttacctgcaaaactccttcttctcggcgggctatctgatggcggcaagcatcgtggccctaaaatgcctgaacctcgtccccgaccttgcggcatggatgataccggagggtgacacggcgttctcaacccgaaacttcggcgagggcgtggcacagcaggccaaaatgacggcgacgggcgcaatgggtacggtaatgagataacaaagtaacgataaatattcaaacaaaatggtcatcaagaatttagagaacaaaatcaaactggtcggaattatctgcaccgcctttctcgtggggtgcgtcatcatcagcgtgtcgagtatctggacggcccgcatgatggttacggacgctcaaaagaaggtgtatgtgctggacagcaacgtgcctatactggtacgccgcacgacgatggaggaaacgcttgacgtggaagccaagagccatgtcgagatgttccaccactacttctttacccttgctcccgacgacaagtacatccgctacacgatggagaaagcgatgtacttagtggacgaaacgggcttggcacagtacaatacgctcaaggagaaaggtttctattccaacatcttgggaacgagtgccgtcttttcgattttctgcgacagtatcaccttcaacaaggagaagatggagttcacttactacgggcggcagcgtatcgaacggcgcagcaatatcctgatgcgcgaactggttacggcgggacagctcaagcgtgtaccccggacggagaacaacccgcacgggctgctcattgtgaactggcgcacgctgctgaacaaggacatcgagcaaaagacaaaaagcaactattaactctaccagtcctatgaatatcaaaggattcagacgtatgctgttcggcgagaagatgccggacaagaacgacccgaaatacaaggagcgctacgaacgcgacgtggatgccgggcgacgcttcgccaaagcgacacgtatcgacaaggcagtggccaaagtacagggtttcgccaacgcccaccggacgctgtttctcgtcatcgtatttggcttcgccatctgcgggctgacatggaatatttaccgcctgacggtggtgtaccgccatcatccgacccgccggacggccacggagatgcaggattccgtgctccgggaacggcataagatgctttccgtaccgcatgtacgaagattcgatacgaaggaaagtggtacggaaaggccggaatagaacggcaggcttatgaatatgccgtttgagagaactataagcaagtatgtgcaactcaattaaagggaaacaatgaacaatatcttcaagagaattaatttcaggcagccaaagtatatgcttccggctatcctctatattccccttctcggcacgtcgtacttctttttcgacctgttccataccgagaaggtcgaggtacaggataagacactccagacgaccgagttcctgaatcccgaattgccggacgcccaaatcaagggtggcgacggtatcggcagcaagtatgagaacatggccaaatcatggggcaagatacaagattattccgctgtggacaacatcgagcgggacgaaccggacaataaccaagaggaatatgaatcgcagtacaccgaagaggacatcgccctgcttgaccggcaggaaaaggaaaatgatctggcagcggaagcggccgatgccaagaggcgggagcaggaagctctcgcagaactggaaaaagcactcgccgaagcgaggttgagaggacaacgggaggtcatgccgtccgaaacggacagcaccgcaacggcggctccgccggacacgatgacgcaggccaagggaaccatcgacgaggaaagccgttcggtcaaagctcctgcggagacggacaaggcaagcgaggtggtgaagaaggtaaagacggcttcggactacttcaacacactggcgaaagacgctcgggaaccgaaactcatcaaggcgatcatcgacgagaacatcaaggccgtggacggctcgcgtgtgcggctgcgcctgctggacgacatcgaaatcaacgagagcgtggtcaggcgtggtacttacctgtatgccacagtcagcggtttctcttccggacgtgtaaaaggaagcatcaacagcatattggtggaggacgaactggtcaaggtcagcttgtcaatctacgatacggacgggctggaaggactttacgtacccatcagccagttccgcgagacaagcaaggatgtggcgagcagtgccatgtcgggcagcatgaacatgaataccagcggatacggtaacagcctcgcccaatggggtatgcaggcggtgaacaatgcctaccagaaaacgagtaacgccatcagcaaggctatcaagaaaaacaaggtgaagctgaaatacgggacgtttgtgtatctggtgaacggacgggaaaacaggaactaaaagggcagtgacaatggaatcagacatatcaaaacttcataagggaacggacggcttctattacgaggactacatcgctcccgataagcccgaaacattcgttgggaagctcgtaagtaccgaatggtggcacaaaggggtacgattcgccctgatatgcaactttcaggcagaagacgggcggaggattgccttattcgccttccagaagcataccggtttttacgggccgagagacggtgcggtcaatttcaaacatgtggagaagaataccctctgggagtgtgaaatccggaaaacccggacggaacgctgtacctggatgagcgcccgacaaattgtagaactgaaaacagacgcaatatgatagagacggatcgcatttaccttatggactgcatggagggcatgaaacagatagcggatagtagcgtggacgccataatcgccgacctgccttacggggtgttaaatcgcagcaatccgtcggtgaactgggaccgccagataccgttcgcagccttgtgggagcaataccggcggattaccaagccggacagccccattatcctgttcggacaggggcttttctccgcatggctcatgctgtcgcaaccccggctatggcggtacaacctcgtgtggcagaaagatcgggtgacgggacatctcaatgccaaacgtatgccgctccggcagcacgaggatattctggtattctataaaaaacagccggtctatcatccgcagatgacaccgtgtcctccggaacggagaaatcacgggaggcgtaaaacggagggatttaccaaccgttgttacggaacgatgaaactctcaccggtacgcatagccgatgacaaatatccgacctcggtcatcttcatgccgaaggaacacaagaaaggcgcgttctaccacccgacacaaaagcccgtggcgttgatggagtacctgatacggacctacaccgacgaaggcgatgttgtactggacaactgtatcgggtcaggcacaaccgccgtggccgctatccgcacgggacgacactacatcggatttgaaatcgaacaggtgtactgcgagattgccgaacggcggattcaggaggaactggaatgcaggaacaaagcacaagaggaaaaagagataagggaagaaaaacaaaatcaataaatcaatgacatggacaaaaaaggaatcgtaacggcatttcttctggcggcaggactgctgggaacgccgaatgtacaggcacaacgaacctacgaggagatggaacaacttacggtaaatgaacaggtaacgacggtcatcacggcctcggaaccggtacgcttcgtggacatctccaccgataaggttgtcggtgaccagccgatagataacatcgtccgcctgaaaccgaaagagggcggacacgaggacggcgaggtgctggccatagtgaccatcgtaacggaacgctaccgcacgcagtatgcactgctctacaccacacgggtgcgggaggcggtaactgacaaggaaatccagttgcaggaacgaaacgcctaccacaacccggcggtctcgatgtccaccgtggagatgacacgcttcgcccggcgtatctggaactcgcccgcgaagatccgcaacgtcgccaccaaggcacaccgcatgaccatgcggttgaacaacatctacaccgtgggagagtatttcttcatcgacttctcaatagagaaccggacgaacatacgtttcgacattgacgagatacgggtgaagctggcggacaagaaactgaccaaagcgactaatgtgcaagtcatcgaactggtcccggaactggtgctggagacgggcaagacgttccggcacggctaccggaatgtggtcgtggtcaggaaaatgacgttcccgaacgacaaggtactgaccatcgagatgacggagaaacaaatcagcgggcgtgctatcagcctgaatatcgactatgaggacgtgctgtcggccgattcgttcagcacggcattgctggaggaggaatgacaatgagaaagacgattatcctgacgattgcctgcatgtgcctcgccgtcggcgcgaatgcacaacggggcagcggccgcctttcgctcggagcggggctgctgtacaagaacgagctggacgtgacgctggcctacgaacacgagatgaactaccgccatgcgtgggagttctttgccaacggctacctgcaatgggcagagtgcgaatcctgcaagcatgtatgcccgaaatctttctggcagaattaccgtacctacggcttcggcgtggcttacaaaccctgcgtcacgaggggacgcaaccattacggaagcctccgtatcggggcttcgggcggaagcgatacgaggaagttccttgtcgggctgcatttcggctacgagcacaactatgtgttgcgggcgggctggacgctatactggcaagtcaagggagacgtgatgataaagggggccgatgtgctgcgtacaggagttgccctcggtattaaactacctataaaataagggaaagatgaaacagaacactatcagaaaaacgtgccaggtagtgccggttctcctcataaccggggcattggctgcctgcgacgcacatatagaagaacccgacaagacggtacgtcccggacatgtcctctgcgtggacggcaaggccgtgccgtacagcgagtatgaaaattccgggaaacaggcgattgccgtcgtcttccatacctattcggacggggaaacggaaggaaacggctatgccgtctatctgtgggacatgacgccgaaggcttttgccgacagcctcggtgtcgagcagggtacgtcggcggacattgctgcatacgacgggaatgagaacacgttcgccctgtacgatacggaagaaacggcctcgccgatggctgaagccgtttttgccttgtggaaatacggacagagcgcctatatcccctcggtggcacagatgcgtctgctgtattcggcacagaccgtcatcaatccgattatcgagaaatgcggcggcgacccgctgccgaccgaggccgacgagtgctggtattggacatcgacggaggtggaaggacagcagacagtcaaagcatggctctactcgacagccagcggaaccatgcaggaaacgcccaagacacaggcgcataaagtgcgtcccattataaccatcaacaactgaatttatgattatgaacggaattaaagattttcaagcaccacagtatgtggatatagtacatccggacaaaggattcttcgggtatctgttaagatgcaaatgtcctaaacaagaggacgtttccggtaatttcatattcctcgacgatggaatagactgctacaagaggtttccctccgtaaagaatcgcagggaagaaatccgggcagaatggaacggccgtatcagccgttaccatgatattttccaaggtcagctctgctatgtcaatgaagaattgattgaagatttcattgatttcatgacttatggctctgacaatgccgtccggattttccttgagaagtttacagcggaagtacgggcttctgcaatatatgacgggcttaaacctctatatgcagtttcccatgtctgccagctttccgctgataaccgtatgcaatggcctcacatccacgtcctctggggtattaaaaagaattgacatagcaatggaagagagcaaggaattacagggattttaccggatattccgtgcggtggtgtatgtctccgtactgatggagtttttcgagtatgccatcgacccggccatgctggaccactggggcggcatactctgcgacattcacggacgtatcaaacggtgggccatctataacgacggcaacctcgtgtacagcaaggtcgccacggtgctgctgatctgcattacctgtatcggcaccagagccaagaaacatttggaattcaacgcccggcggcaggtcttgtacccgctcgtgagcggctttgccctgttagtgctgtccgtatggctgttcggtcatccgatggagacgcggttctacacgctgccgctgaacattattctctatatggcggtatcgctcacgggggttatcctcgtgcatgtcgcactggataacatctccaagttcctcaaagagggactgatgaaggatcgtttcaatttcgagaatgaaagtttcgagcaatgcgaggaactgatagagactccgtacagcgtgaatatccccatgcgatattactacaagggcaagttccgtaaaggctggaccaatataaccaactgttttcgtggaacatgggtagtcggaacaccggggtcgggcaagacattcagtatcatcgagccgtttatccgacagcactcggccaaggggttcgcgatggtggtctatgactacaagttcccgacgctggccacgaaactgtactaccactacaagaaaaaccagaagctcggaaagttgccccaaggctgccaattcaatatgattaacttcgtggacgtggagtacagccgccgggtaaatccaattcaggcaaaatacatcaacaacctcgctgcggcgagcgaaacggcggaaacgctgctggaatccctgcaaaaaggcaagaaagagggaggcggcggcagcgaccagtttttccagacttcggctgtgaacttcctcgccgcctgcatctactttttcgtgaactatgaacgcgagccttacgatgccaaaggaaacaaattgtacgctgaaaaacggcaggacccggagacgaaattctggaaaccgacgggtgtggtacgcgccaaagagggcggggaaatcgttgaacctgcctactggttaggcaagtattcggatatgccgcatatcctgtcgttcctgaacgagagttaccagaccatcttcgaggtactggagaccgacaacgaggttgccccgctgctcggtccgttccagaccgctttgaaaaatcgcgcgatggaacagttggaaggtatgatcggtacattgcgcgtctatacctctcgtctggcgaccaaagagagttactggatattccaccgtgacggtgatgacttcgacctgaaagtgagcgacccgaagaatccgagctacctgctgatagcgaacgatccggaaatggaaagcattatcggagcgttgaacgcccttatcctgaaccgcctcgttacccgtgtgaatacgggacagggcaaaaatgtccccgtgagcattatcgtggacgagctgccgacgctgtacttccacaagatagaccgcctgatcggcacggcacgaagcaacaaggtgagcgtgacgctcggcttccaagaactgccgcagctcgaagcggattacgggaaagtgggtatgcagaaaatcatcacgacggtgggtaacgtggtgagcggttcggcccgtgccaaggaaacgctggaatggttgtcgagcgacatcttcggcaaggtggtgcaaatcaagaagggtgtcacgatagaccgggacaagacttccatcaatctgaacgaaaatatggacagcctcgtacccgcctcgaaaatctcggatatgccgacgggctggatctgcggccagacggcacgggacttcatccaaacaaaaaccggcataggcggctcgatgaacgtgcaggaagcggaggagttcaagacctcgaagttcttctgcaagacggatttcgacatgaaggaaatcaagaaggaggaagcggcgtatgtaccgctgccgaagttctacacgttcaagtcgagagaggaacgggaacgcattctttaccggaattttgtgaatgtgggaatggaggtgaaagaaatgataaaggacgtgcagaacaaacgaggggcgaaataagaaacctgtttccgatatgagggaaagtaaaaaaaatgcctgcaatgattccgcgattattgcaggcgttttggcgtttccggtatcttggaaaatcctgtggagttggttttggtattcaatactacacaaaaagtatattataccgaaacaaaatcaactttcaagacctttggaacggaaaataatgctacctttgcagttgaaaaagaaaacaaatcatatactgtggatatagaacaaaaaagcaaaataaaccaactgctgctttccgccactcccaaaggattgttattctccgaatggctgaaaaggaacggttattccgaccagttgataaaaagataccgggaatccggctggcttgagatgctgtcaaagggagtcatgtaccgaacgggagacagcctgtcggcatacgccgcattgtcctgctacaacaggcaattgggcaagacgttccgtgtcgcagctcattctgcattggaactgttcggcttcaaccactatgtgcctatggggaaaccgttgctgatggtggcacacggcaaacagcgtgttccggaatggatacgccacgatgttttcgacagggtgataaaaccgttttccaccgataccttttcagaaccgcagaccgcaacgattgtgaaatacgaagtggatctgctggtttctacacctgaacaggcattcttggaatgtctgttgcttgcaccgcaacaatattcctatatggacttgttctatatgatggaacaactgacaacgctgcgtcccgaaatgctacagcaactgctcgaaacgaccaagaaccttaaagtaaagcgtatgttcctttatatggcagaaaaagcgggacactattggttcgaggcacttgatacatccaaaataggactgggaacctccaaattgcaactgtcaaaaaacgggatttatatctccaaatacaaaataaccgtacctaaagaactgaacgaatatgaatgacatctataaaaaacaggtggcattgttgatacgcattatgccgtccgtgtaccgcatcaaagattttgctgtgcatggaggtacggctatcaacctgtttcataaaaacatgcctcgctattcagtcgatatagacctcacctatattcccgtaaaggaaagggccgagagtctggacgcaatcaacaaccatctgcgaactttgaaaagctacatagaaaaatccataccgggcataaaagtgatccacaagcatgatgtctggaaattacaatgtactttggacggtgcgaccgtcaaaatcgaagtgaacgggacaaagcggggtatcatcggagagacagaggacaggaaactgtgcgaacgggctgaaacggagttcaatatgacctgtaaagcacgtacagtttcttattcgcagctttacgggggcaaaattgcagcggcattaagccgccaacacccacgggacctgttcgattgcaagtatatggaaatggcgtcgtttcatgatgtcaagaacggcttcatgctttgcctgttggggagcgacaagcctgtcatcgaatctttgcagccgaacgccatcgaccagacggaagcactggaaaagcagtttgagggaatgtccgatactccattcacttattcggattatgaagaggcaaggcataacctcattcagcaggtaaacgacagcctgaccgaaacagaccgggaatttcttctgtcatttgaaaacggcgaacccgattgggaaaaatgctgtgccggagatttaagccgctatccgtccgtaaaatggaaattacagaacattgccaagctgaaaaagagcaatcctcaaaagcacaaggcgggattggaaaagctacagaccttcttatttccgaagaagggataagtttttatgggcatcatgccggacagattggtgttaacggaaaaacaatatttggaatcatgtacaatatgcgagaaataaaagaggaagactttgaagcggtggcaaaatttgaaattgaaatttctgaaatctcattcggagaaaaggctattactgacctcgagttccactgcaagaaattagccaaagcaaaagaccgacgcggaatgatcgtgatagaagacacggaatccggtaaaattgtgggctgggtatggatggagaaaaagcagaacagcctgaccggagaggtttatgccaacttcaagtccatttatgcggatgagtgcattcgaggaatgcaaattgtagacgacctgtttgaaaaaagcatagaatatgcgagagagtgcaaggcggcttatattgtcggcaaggttcatgccgggaacgtaccgatgcgctctttgtataaaaagcattgcttcgagccaacccatgtaacgatggaaaggaaattgttatgataacgtccggcatacaaagttttgctctctcgcatggcgaacaatacaaacacggaagaacaagcctgcgtgacttgtcaggtaaactgcctttcgtggcaaacgggtgtaccatgctgttatgcgttgaaggccgggctgtcgtaaccaccaatacacgaaaacggacattccgcaaaggtgatttgcttgtgttgttttcggacaccttatttgcaccgctgtgtgtttctccttcattcacggcagaatatatatccttgtcattggaactgacaggggagattttctacaaaatgacttcccccgcattttgggacggactgtatgaatatccggtctgccgactttcggaagcacaatactcattggcagacggagtgttcaagcagatgatatgggcgatggagaacggtgatgaagaaagccggaaaaacatcctgcaaaattgcatttacaatgtttttctggctttagatattgtgttcaagccgatgtttcccgacttgggcaagtgttatcaaaaggatcagtcaagggtgctgttcggcaagttcatgtcactgctggctaagaatttccatgtaaaaagagatgtacgatattatgcggacaggctttgcatcacgaccgattacctttataagataacctgcaaaatagaacagcggactccgaaggaaatcattgacctgtttgtcgtaacggaactcaaacgctatttggacaacacagaacagtccgtcaaagacctggcccgtctgttccatttcgaagacgcgtcgtacctttgccgctttttccgccgcacggcaggctgttccgtttccgaataccgcaacaggcttggccgctcataggctccccgcatcaaatcgctgtattccactttcgcacatccgagccgctcctgcaaatagtcgaaagcagtccacggacggacattggtgccgcatgtgaacaaatcgacagcggcataaccacactccggccacgtgtgtatggtcaagtgggattcttggatgaccaccacaccgctcacacccactggggcgtatttgtgaaagttttcctgtactatggtcgctccggcacttactgccgcttcgtgcatgaatgtgcgaatctgttccacatcgtccagtttttccgggtcgcagttgtagaagtctgcaaggatgtgatgccctaagggaaggtattgctttttatccgtattcccgtttttgtgcagtctgtcgaaaaccgtagctccgcatacattgcagccttgttttttcaactccctgatggtctgatattccgcctctttccccacggcatagactttgccgcattgccggcagcggtaacggttttgccggagattgcggtctgcggtgtagatgtcatcgcgccctcgtttttcgagaggaaacaaggcgcgtgtacgttctgtcgtttccaggacaaagagctgtcctttgttgcccaaaagagatgcgcccatgtattcattgaaccgggtgaacatctctttgatggccagtccgtgcagttggaaacatttttgcagaaagtaaacctccgttgccgacttgttcccgaacgagaaaaagattctcaatccggactcttctttcagtacgctaatggcacgtgacaggaacaaggaagctccctcttgcgtataaggcggatcggtgaacaggcagtcgaaacgcccgcacaaatgcggaggcagaggcatcctcaaatccacccgttcacaacttatcggcagggcgaaccgtccggccagccgctccagacactcgatataacgaccgtccatctcaagtacatggatgtgtgtcgggcagatgcttggaccgggataaagttctttcagcagaaacccgatggcaaggctgacaaaatcatcatcgcccatgcatacgatttgtctgcctgtcaatgtgccgtttgccaagcagagcaaagccctgcggaatgctgtctgtacggtacattgggcttggtccagtgctacatccgctacggggcgttcgtcgaatgccgcacggtattttttactcagcgcgtcagcgtatgcgtcccttgcctgttcgctttccgccagtcggcgatacaggcagaggtcaatccccttgaatccaagagcttgttccacatactcctttccgttatgagtaagccctacgcctccgctgcattgttccaatatgcccagcctgataccttcgttctttatggcggtcacgataggtaccggcaagagtaatttttgagagagggctttgttggaaagtggcgcaaaacaatacagctcctgaaaataaagttcaataatccgtcggctatccttaattgatactgtcttaaatattttgtcgatataatccatttattacatatcgttgatttacaggctgcaaaaatagaacaacatcattaagtaatagagagcaaaatcctgctgatatgggtacttttcaatacaaaggcagataggttggatatatggccagacggctcaggacttcatccaaacaaaaaccggtataggcggctcaatgaacgtacaggaagcggaggagtttaagacctcgaagttcttctgcaaaacggatttcgacatgaaggaaatcaagaagggggaagcggcgtatgtaccgttactgaagttccacacgttcaagtcgagggaggaacaggaacgcattctttatcggaatttcgtgaatgtgggaatggaggtaaaagaaatgataaaggacgtgctgaacaaacgggaaactaaatagaaagccagattccgatatgagggaactaaaaaacgcctgcaatgattccgtgattattgcggacgtttcggcgtttcctatctattgtgaaaatcttatagttcaaaatcagcttcttgcggccctacataaaagaagggaaatcaggtgttttttatataacgggtacatttaccagtccccctttttttgtataatacctgcatcttccgttttggagataaactcccgaacctgtttttcggacagtatatctgcgaatatttccttgaggacagcccggttgatacaaccatttttacggaaacaacaataaaatcctttcagtcttttaccgcagtttcgacgggagtttatgaaaataaagtcgtatctttgcactctctatcaaacagataaatccatgtgaacaaagggttgaacggacatatcgccatgctttcgacacaaattatttgtggtttgaatgtacctgtcggtaaatcgctcctggcagagtggatgacaccgattgggcttgcctcctctcgtgttttattcgccacgctgatattttggacgatcgggcttgttttcaggagagaaaaggtcaatgccaaagacttgatggtgattgctttgggcggtatttccggtgttgcttgtacttatctttcctttgcgtggggacttaattatacgacaccagttcacttcgcacttattgtcgccttaaatccaatcgtagttatgctcttttccgtattgtttttaaaagaagctatcaaccggcggaagttgacaggtgttctgttgggaattgcaggagcatgggtcttgatttcacaaatggatattgccgcatccgttgaaaatcatatacttggcattgttttcgccatcgtcaatacagttatgctcggattttatctgattatcatccgaagagtggcgataaaatactctcctgtcacacttcaaaaatggatgttcctatttgcagcattgtccatgctgccgttcagtataaatgaattgtacgtgcaaccgctttatcagtccgcgttctgttggcaaccattactccagcttgtattcgtattgttgctggcaactgttctcaacaatctgctatatcccgtcgctctcaaggggatacagcccaccactgccagcatttacatcaacctacagcctattatagcttctgtcgttgccattttaatcgggcaggacatttttagctgggatgaaccggtttcggccatacttgtcatatccggtgttttactggtcagtcattcacaaaataaaaaataaagctaatttgcggttctgtattcattgggcgtacacccggccattttcttgaaccaacggctgaagtgttgcggatatggaaatccaagttcataggatatttcacttatggacttcgccgtattgaatacccgctctttagcgacatcgagcattttctgctggatgtgtttcagggcaggcattcccgtttcttttttcatcaggtcactgaaataattcggggaaagacaaagtttgtatgcacaatattgcacagtcggcatccctccatgccttgcaggggcatcagaggcgaaatactcatccagaaggtcctcgaaacgcgctaacaggtcgtgattggcattgtcgcgggtgatgaactgacggtcgtagaagcggatgcaataatcaagcagcagcttgatgttatccacgatgagcgaacggctgtgcttgtcgataggatactgcagctcaatgcgaattttttccatacattctataaccgtccgtctttcttgtttggaaaggtgcagggcttcgttggcattgtaagaaaaatatgaataatctttcattatatgcgccaatggtgtacctcgcagaaattcgggatgaaatgcaacaacccatccttcgggctggtgcagctgcccgtcatcttcagatcccattacctgaccgggggcgaggaaaagcatcgtcccctgctgataatcgtatatactttttccatatttaagatttccacagttcgcatctttcaatagaatagcatagatgttatacagttttttcccgaaccggagaggcttccctttactgccttcaataacgctgaccaacgggtgcagggtctccacgccaaaatagtcgttgtactgctggactgtatcaaccttcattatttcactcataatttcctcttttttaagtcattgcaaatatagctatttttctgtgatagcttttcattctgcttttaattaaaagcaaagatacggattcccgatggtacggcatataccgaaatcatcgttttggataccaattttactggtataccggcatcgttcttaccggcccgttgaaattggtaattctatccgtgaaattgatacacaggctcttaattcccctatctaattttgcaatcagaaagataatcaaacagataacgacatgaaaaaagaacagattcaagagaacggcatcagtcgtcgcgggttcctgaaacgaaccgcattggcaggcgcggccatctgcatcgcgccggcattggagaaagtaacggccgcggaaaaagccattacaggtaaatcgtcagtatcggcagcaaccattccagcaggaatggcagcagtccgcgcacagcgtaccttgagcagcggcaaggcagcctttaccatttcggcgatgggcttcggctgcatggggctgaaccatcaccgcagccagtctcccgatgaaaagacctgcatccggttgattcacgaagcgatagaacggggtgtaaccttattcgatacggctgaaagctatggctaccacaagaatgaaaaactggtaggcgaagccctgaaaggctataccgaccgcgtgttcgtctcttccaaattcgggcacaagttcgtgaacggcgtgcaggtgaagaccgaagaggacagcaccccgacaaacatccggcgcgtatgcgagaactccctgcgcaatctcggcgtggagacgctcggcatattctaccagcatcgcgtcgaccctgcgacgcccatcgaggtcgtagccgaaacatgcggcgagcttatccgggagggaaagatactgcactggggcatgtgcgaggtcaatgctgaaaccatccgccgggcgcacaaggtatgtccggttacggccatacagagcgagtatcacttcatgcaccgcgcggtggaagaaaacggcgtgctggcgctttgcgaggaactgggtatcggtttcgtgccgtacagcccgctgaaccgtggtttcctcggcggcatgataaacgagtacacccggttcgacaccgccaacgacaaccgccagacgcttccgcgtttccagcccgaagccatccgtgccaacacgcgtatcgtggaggtactgaacgctttcggacggacgagaggcattaccacggcgcaggtggcattggcatggctgctgaacaggaggccttttatcgttcctattcccggcacgaccaagctctcgcacctcgaagagaacctgcgggcctgcgacatagtgttcacgtcggaagaagtgaccgagctggaaaaggccgtggccgcaattccggtcgtgggaagccgctatgacgctttgcaggaatcgaaaatccagaaataggaagggcgtatgagaaaggttgtcttttatatgatggccgccgccttgctgtcgggttgcaacgcacgcaacgggaatatcatgcaaatcgaggaacagggcagtttcgccgtgggcggcacggtgctcaccgattcactggggcgcacctatcacggcgaccacgcctacgtgttctatcagaaacccgtcgatgcccggaaatacccgcttgtcttcgcccacggcgtggggcagttttccaagacatgggaaactacgccggacggccgcgaggggttccagaatattttcctgcgccgcggtttccagacttatctcgtcgaccagccccgccggggaaacgcggggcggagcacgacacccgcgaccgttacccccgtcttcgacgaggagacgtggttcaaccgtttccgcgtgggcatctggcccgattatttcgagggcgtgcagttcagccgcgacaaggaggctctgaaccagtatttccgtcagatgacgccaactctcggccctcccgatctggatgtctacgccaaggcgtatgccgcactgttcgacaggataggtccggctgtcttcgtcacccattcgcagggcggaggtgtcggatggcttacactgccgcagacaaggaacatccgtgccatcgtcgcctacgagccgggaacaaacgtgccttttcccgaagggcagatgccggaggaagggaaagtactaaccctgtcgaagaagaccgaaggcgtggaagtgccgatggaagaatttctgcagttcacgaaaatccctatcatcatctactatggcgacaatctgccggaaaccgacgaacggccggaactgtacgaatggacacgacgcctgcatctgatgcgcaaatgggctgccttgctcaacgaacacggcggcgatgtcacggtcattcatctgccggagataggtttgaagggcaacacccattttcccttctccgatttgaacaacgtggaggtggccgatcacctgtcgagatggttacatgagaaaggactggattgagaaggcggagtcatggacgaaggaactttctgaaaatggcgggaatagccggcggaacgatgactgaaaacgactattgagttaatcgaacaacctttaacaattttcatatgataccattatttatcggaggcatcggtatgcaggaagtgctgctgattgcattagtcgtcctgctgttcttcggaggacgcaaaattcccgaactgatgaaaggcatcggcaaaggtgtccgttcattcaaggaaggtatgaacggcatggagaaagaaatcagtcccgaaaataccgacaagaaagaggagtgacatggcaaaggaagacaaaacggacggcttgaacttttgggagcacttggacgtgctgcggacggcgattgttaaaatcgtcgccgtggccgtcgtgttcggtatcgccgccttttgttttaaggaaaaactttttgccgttatccttgccccgaaaaacgacggcttcatcacgtaccgtcttttcaaccggattgcagcatgggccggcggcgagaccgggagttttgccgtgcagctcatcaacacgggactggccgggcagttcgtcatccacatgaagacggcattatgcgcgggtgtcctgtgcgcgtcgccctatatcctttaccagttgttccggttcgtgtcgcctgccctgtatgcctgcgagcggaaatatgccgtgcggatagtcggaggcggctatgcaatgttcctgatgggtgtggcggtcagctactttcttattttcccgctgacattccgtttccttggaacctatcaggtcagcggtgaagtggagaacatgatcgtcttgcaatcctacatttcgaccctcgtgctgatgtgcctgacaatgggtatcgtgttcgagattccgattttatcatggctgtttgccaaattggggtttctcaccgccgatttcatgcgacgttaccggaagcacgctatagtgattatccttatcgttgcggctgtcatcacgccgacttcggacgtgttcacgttgtcattggtcacattgccgatgtgggttttatatgaagcgagcattctggtcgtaaatagagctgcaagtaaaaaggcagtagacagataaagaaacgacatcttgaagtgaaaaacaatctgccggccaaaagataaaacaaacctttttacaataagaggtaaggtactgtaacacgtaggtaatccgttttataaacggcaggtttttattcgtttctgcattatacatagaaaagccgtaccctgctcgttttccgaaaggcacggctttcatcccctaaaaagaggaatcagacagtgacaacagttacatataaattctgtcgctcctgttcgcagaatttatcgtactcggctttgtccgtgccgctctcgatagcccggtcgataacgtctcccaactcgtcgaaacaaacctcttcgttcacacattccacctccattcctttcacaagatagacctcgtaataatccgatccgttgagtgcgacgatgacgtaccctgcgtgcagccgtccgttcaccttaatgcggagtgccggcaaatccctgtatagggtggcggcaaactctttgataccccacgacatgaggacggtcatgggggttaacgctactaactgttccttaatggtctgtgcgacctgcattacatattctttttccataattctaagtttataaattattattccatgatttactcgaaccaatcggggttatcctttttgagttcggctatcaactcgttttcgggaagctgaagcgttctctcgtcggtaaagaagaaaatctcgtcataaatcctttcggcttctttactggcaaaaccttcgttctcgtcattgaaactgccgggctgcaaggcatcgagcaggattgtcgaaccgataagcaattcttcgccatcgacagattccacgatgcgggagtaataagacctgccgttgaattgaatcttagttgttttcatatcgtcgtttttatattaatggtacattttttccgtgttcattgaggtattccatgatatgcttcgcttcctcgtgcgatgcccggttccggtcatcgtaacggcgtgtttcgtccgccatgaccttgatacacgccttaatcaggcggtacaggctttgctgaagcgtcgggtgcatgtccgggattgccgccgcgaaccgttcggggttgaaactgaaactgtttaccgccatttcccagtctttggcgaggcggtattctttgctttctttaatgtccatattcttgaattttaatagttctcgttgcatattctgtcaagttcctcaattatgggtgtcacctttttgcctgtaagactttctatgtcatacagcaagtgctccaagcgttcatacgccttttctcccgcttttgtaaattctccggtactgtcgaatgcgctaccttcgcagcccagttcttgcaataattcttctaatgtcttcatttgttaaattttaataattgtttttctttccctctgttcggcttccttgttgccggagccgcttcgggttttatggtgctttccggggctggcgaaaaagccctttccgacgttttttcttgccaattacgcttcgcagaaggaagaatttgcaagaaatgcacttcaaaacgacggaatcaggcgcgacagcccatatttgcaccgataaaaaccggtgcggtgacggacgggaaagccagacgggagagaatacggagacctgaaagcggtagaaaaggacggctggaagctaaaaaagagaatttatatatctatatatggataattgttgttatatttgcatataaatagtgatatattgacattatggaaacaacgaactataccacaaacagcgatatgctgacgcttttggcgaagcgggtcaaggagtaccgtctggccgcccgcatgagccagaaggagctggccgaacagtcgggtgtaagccagacgactatcagccatttcgagcagggggtcagccgtaacctgaccttggccaatttcatctccctgctgcgtgcgctcggtcaggcagagcggctcgcggagattctgccggaacttcccatgccgccgatggcgcttcgggaaatcgagaaactgatacctaaacgagttaggaggggcaagaaatgatagaaagtctcgatgtaatcctatgggataaaaaggtcggcacgcttgtcgccaatcgggaaggacaccgcagcaaagcctgtttctacttcgacagcgattatgtccgcgacggctacgacatcgccccgctccgtgcgccggtaaaaggggttgccgcacagcgcggcctgccggtctatcccgatgaagagcggcttttcggcggcctgccctcgttcatagccgattcgctgcccgaccattggggaaacaccgtgttcaacgaatgggccaaagtgcatcatatccgtatgagggacttgtccgccctcgaccgtctcgcctatatcggacggcgcggcatgggggcattggagttcgtcccgcccactgccgaggaactggagacaccgttcaaggtggagatcgctgacctctaccaactggcccggcaggctttcgaggaagccggacggttcaacgtcccggtatcgggcaacctgatggtcgaaagcctgttcaaggtaggaacgtccgcaggaggacgacggcccaaagcggtggtcaacgtcaatttcggggaaggacaatgttactccggacaggtggcgaccccttatccgggctacacgccgatgatcgtcaagttcgacgaacaccagaagatgccgacgacacggatagaatacagttattacctgatggccgtagacgccgggcttcagatgatgccgagccgcctgttggaaggtgagcagacagcgcacttcctgaccgagcgtttcgaccgccggaacggcaagaaggtgcatatccagacattggctgccatgaacccctcggcagattcttacgaagcactattcgaggcggcctgccgtatcggcgtgccgccgggggaactccggcaactgtttcgcttgatggtgctgaacgtgctgggcgggaacgtcgatgaccataacaagaatttcagcttcctgatgggcgatgacgggcgttggcacgttgctccggcctacgactacacgttctcggtcgatccggacgcaccgtattacgtcaaccgccacagcatgactatcaacaaccggacagagggtattactgcggcagacctgctggaagtagcccgccggtacggtataaaggccgcagagccgttcatagaaaagaccataggcatcgtttcgcgttacccggaatacggccgggaggccggtgtcggagaggaatggataggaacgatagaaaaggaaatcgctgcacgagtggagtgcgtgcgagccgattaaaatagagcatgggatttcatgcaggggaaatgaacccacccgtttttgtggcgggtgggtttgtcgttgtcattccgcccctttcttgcttaggagggtcaactggtcgggacggtcgggaaaccaataggcgtcgctgtcaagatatacgcatctgtcaccattccaaggcttcctgaaagctaatacctcttgagggccgaatactactccataatcgtttgtaaatgctaccatgtcgcctacggccaaatcgtcctccgtttccatgacttcggaaaggcgattataaaactccatgccttcggcttcacgttccgctttccagcgcaaaaaatcctctttatgacttctgcccgtgtttatcggcgataattccgaaggcaaaacctccgcttccgaagtaccggacgaaatcagaataatgctgtcgtcttccatgttttccggtgcagaaatcactcggtaagccccatcggacaaaccgttgtccgggtcatgccaataaagcagattccctgtcttgataaaatcgtattttcccattgtcttgtgaattattgattatttatttcccttttttcgatccttttcctttggaaccgcttcggggttttactgatgcagtacacggtcgtcggcacagcttcatacgacggctcttcttgccaattacgcttcgcttgggaaggaagaatttgcaagaagtgcacttcaagccggagaatcaagcgcgacgaccgactttcgcatcggataaaacccgtgcggtgagggacgggaaagccggacgggagaaacaggcggctcgtgccgctacaaaagggaaagaatgcaattataagaggaaacgggcggtggcggggtatccgggaggctgactataaaaggacgaaggcgggcgataaagacaaaggagatagcgcactgactgtgttatcagtacgccatcttgtacattcaatcttcggaacccgacactttcatttttgggaacaatccttttcaaaagcattcttctccgaatggctcgatgttcgctttttggaaaatttgcgggttatgctgataaagaagcggcaggttcaacatagccatagggtattccacgaagccgctcctgcgtttgtagccggaatcggtcgccaatctgttttctaccaaaaagtccaacgcatccgggtaattgttcacgtcgataaaggtacggtccggcaaaccgagcgcatccatttcctccaaattgacggaaagtacgatatattcgtcttcatcttccaccattaccaagataagagccaaccagccattgcgataaaaccgtggtacgaggtaataccgttcgcctctgaactcgtattctttctgtctgaaagagctgtccggctctacgatttcaaattcatcttcacctgcggtaaaagcaatcatagggttgctggcatctacatacgcttcacctgctttgtagcacaaatactctctgttttcggaacgcacgatagcaaattgaatttccataaaatcttaacattaatcagttgaacaatctgtttattttttccctcctttcggaagccttcaggcttctcctgtcgggatttgatttttacgtgcattaaagattgcctttcagggagaaacaggcaaggaatttgggcagaattttatagttgcggtattgagcgtccgcgaaatatggacgattgaaaatcgggaaagctgctgaaaaattgtgttcaaatagcgtagcggtacttgaatgttcctccaaggcaatacctttgcaccggaaaaagcatgtcccgacgggcagagccgttggcgaagggatttccgtacaaaaggaaaacgaagggataaaaagggagatctgccaacggcagtgctaaaaaagacagccgctcctgcggctctctctctgtagcgttgcgctatttcttcccggtcttgctatccggttcgtcttgccgttttttcggggtgaacagtccattgaaacagaccgtcgtggcaaaagtacgtgcctgcgtggcattgcacaatcccgctccgggcattgtcgcaccgttgtaatgtttgcagtccttacatttcatcattacctcttttgattggttagacagtaggacggatttctccgtcctactattgaattatggtcaagctgcgacctcttcgggttgcgtatgttcttcgggttgtacctctgccgtgggttgtgtattttctgcctcggcggcttcttcgggctttgtctgccgttcctttgccaacaaggcggctttgcgttcctcgatacgtttatggcgtttctcatacacctcattatatccactttcaatttcggcgagcgtgtcgggcatgtgcttacgggcaaaatcgagcaagagggtcgcagcagcgttattgccgtatgcgcctttgaagttgtctatcaagaaatccctgcggataacggctttctgcttggccgtgaggttggcgatgatgttcattttttcttcgtcctcaaggtgttggtaggcttttttctccccgataccgaataccccgaagtgttccctgcggagagacgacagcaggaagaaatatatcatcttttcctcgtcctgcgtgaatttgctttcagacgtatcaacgtccaaaatctgtttcttagcgtctgcaacggttttctcgacggctatttccttgttacgtttgtcctgctgttccaatttttccaccggggaaagttgtttttcggtagccatgtccgcattggcggcagcacttgccatgtaacacagcgtaatttctttctgcccgatgcagatataaaacgtgagttcgcccgtatcgattcgttcatgaattgacttgcatttttccatatagttgctgaaatcctgctcgtactccttgtatgccgcctcgtattcctcggtagtgtcgtattcttccttttcgggtgctaccggcgtttcggggtatgccgtggcataggtattgaggtgctcgacctcgtaccccatagcggtaaggcgttccaccgcaagcatgttattgttgaaatcttggtagcccaatgatacggaggggtattgttccacaaactgcaaggctttctccacgagataggaagcgttcatttcggccagacaactccgattggcgcaatttccgcaaccaccctcgcagaacaacatcatgttgttggtattgtgggggcatgaggcgcatagggtcttgtcgaatgcgtaacggctaaggtctgtcgtgaaatcccgttcgataaactttgccacatcggcggctttcagtcctcgccaacagtcgtacaacatgctgtcgctgtctttcaagtgtttatagtacacctctttctgaatgtccgtaccgtatcggcaaatctcactcgctacactgattgtgatttcgtccttttccagaagttcggcgatttcgggtatcaatgatacgaatttcagacgggtacggatatagttctcgtttttgccgaactgcacggccaatgactgcacatcgtagcgaccgctttccatgagcttttggtaggcgttggcttcctctatgggggtaacgtccttgcgttgcaggttctccgtcacggccatttcggcggcggtctcgtccgaaacatgcaagatgacagccggaatttcggtcagttctgccataagggcggcacgatacctgcgctctccgaaaataatctcgaagcggtcggtgtccacaatggggcgcacgccgataggttgcaatactccctgctgacgaatactctcggccagttcggcaaggctcgcctcgtcaaagtgcttgcgtgggttatagttgctcggttgaatattcatcaatgcaactgatacgatgttgttctctactactgattgaatgttcgctgtttccataattcataaattttaatttgttattacattagattgtttgattactattgtctttattgtgcggtgtcatactcgtatatttccggattgtcgtacccgtcgaacactatccgaaacgtgtcaaagtcctttctgcccgccagtctgacggtatctcttttcccgatgaaatagggttcattcattgtccgaaacggtgcgccgagcgttatcctatccaccaacgtacaaactttgccgggttgttcgggcatgatataacccagtgcgtactcgttgtaaactaccaatttgattttatccatatcgctgtcaattttacgttgtttttttctttccctcctttcggttcctttctctgcctgaaccgctttgaggttttacggatgcggtacacggctgtcggtacagcttcatacgacggcttttcctgccaattactctttcgcagaaaggaagaatttgcaggaaatacacttcaagccgccgtatcaagcgcgacagcggacctttgcatctgataaaacacaacggtgacggcagagaatgaagccgggaaagcggtaagggaatcggtagaaaagggatatgcccgtcagggttagaatagggataaaacgggccatgtgcctgtacttgcgggcaggtaaaaaagagaaagatggtaagactataaaggaggaatgcgccctatggaaacagcgggcggataaaaaaggacgcatggctgccgtctccggggtgggcagacgcggtagccatgcctgtgtttattgttcgttcttctccagatactctttcattgcctcgttcacgatgtctttcagcgacatgttcttcttgatggcgaggaatttcatacgggtatgaatgcttttgttgatgacgaagttgcaatgaaccgccgtttctttttccgtgggggctgctaccggctgttttccgccggtagtctttttcgtaggtgacagcaacccgtccagtccgcctttcatgctgtctttcagtaaatcgctcttgctcatatcgggattattttaatttcagtacctcttgcgccagtgccatgtagtccttggctccgttgctgttcctgctatactcgaagatgttcttgccctttatgggagcttcggccaaagatacgttatcccgtataacggtcttgaacaccttttcgcagaatgaatccttgacgagttcggccacacttttgttcagtgtcttgcgtttgtcgaactgggtaattacaatgccaccaatagcgagtttcggattcaggcgttcctggacggtggcaatcacattcatgatcttggccatgccgcgcatggcgaggaattgtgcctgtaccgggataatcaggtagtctgcggcggtaagggcgttcagcgtcagcaaccccaacgagggcggacagtcgataaggatataatcgaatttccggttttcgagcaacttgccaatcaggccgttcaatatcagttcccgtcccggctcgttgatgagttctgcctcggcagccgagaggtcgaggcaggacggtacgacggttacacctcctgccgtttcaactaatggcaaggggtatttgcctttcatcgccccgtacaccgtctgttcttcctcaatggagaggccgaaggattccgtaaggttcgcctgaccgtccatgtcgatagccagcacgcgctttttcttttgctgcagggccgcagccagattgatggtggtggtcgtctttccgacccctcccttatggttcaagaccgcaattatttttgtcatcgtttcactcttttattccacttgcaaagttaatactatttttcgtaaatactaaaattagtatatactaattcactaaaaactattgttttagcagtgtagtattttagtatttactactatactaaaataaagtttgactaagagtagtatatcctacattcgcagacgagtggcttactaatctactacatataggatatactacatttagtattcgcttattttcaaaggtttactctcttatcagaaaggcaaatcctccttttcgtcctgcgggaaatctgcaggaggaacgggtgcgccgtctgctccgcttactgcattgtcctctccggctgccgcgccttcccgccttccggtattgataaaggcaatactctctgccgtgatggagagctgtatctggctctcgccgttcttgtctttccacagggaagatgacagcgtgccgtcaacaagtatgagtctccctttcgtcagatattcggacaagcggatatggttgtccttgttgctgcgtacccttatccaagtggtgatgttttgcccctttgaataatcgtcaacggctatgtccatagccatgaatgagccgtgtgctcctgaaattacttggcaatctttgccgatgcgtccgatagtgtgaacatgtaacataatagaaaattgtttgtggcaaggtggttggtcctgccgttacctaactgtttattttttccctcttttcggttcctttctctgcctgaaccgttccgggattttatagatgcggtacccggctgccggtacagcttcatacgacggcttttcttgccaattactcttcgtagaaggaagaatttgcaagaaatacacttcaagccgccggatcaagcgcggcagcctacctttgcatctgaaaaatcggacggtgacggcagagaggagaccgtagaggttatacatataattgatataaagggaagagggcttcgcccaagtataagagcagaggaaaagagagaggtataaaaggaaaccgccaacggagttgcggtaatttacaaacgggtatcgtgcccttcaccgacgatgttgtcataggcacgataccttatcatagcttattttgtcagaaccggtatctcaaagggaggaatgcagcaaatcgcccatcctttgttctggcaaagtacaaaaccctctgacgatagtatctccgtttacgccttcaagtccggcgaacatttgtaatgcgtcaaaccctctgtcgaactgttccatgatgacggcgggggcaaaatggataatcccgtgagggtagcttttcgatgtgccaatccacccgcgcaaataatcatcgaaacagccttctgctcttgacgcatggaactcttgtgaatgggaactgcaaatggttttaccgtagatttcgtctcctaaaattaaagttcccgtttgcggattgtacataaaacgccgattggttatttgaagaatatctatgatttcccatttgacattgataaccatcaggattttttcaacctgccttttcatgcgtttgcctgttttacaatttttcttgtccatcacttgtcttttatgccgtgaaacatctgcttttttacccttttttcgattcttctctctgtctgaaccgttccgggattttacagatgcggaacacggctgccgacagggcttcatacggcgggtttcccggccaattacgctttcatggaaaggaagaatttgcggggaatgcacttcaagccgccggatcaagcatggcagccgacctttgcatctggcaaaccggacgacaccggcagagaggagaccggaacagaccggtaaatatgatggtaaaaagggagtacggctttgcctgtataaatgcaggggaagcgaagtagaaaagggtccggcttgggcgggtccggcaagggtctgccggggcaaacatgaaagggattctccttatccgctccacgcctgaatttcgaccgggcggaatgaaagcgcggagcgaataagaagtatcaccgtttgcccttgacgtggcaggtcacaagggaaagatacggaacagaggcggaaagtccgaaaccagcggcataaagaccggtcgggctgtggaataccgtgttgtttcgacaggtcgaagctccggcatggaacggcacgatccgggctgccgccggttttgaacggcctcccgtacctttccctgacgacttgttacggcacagactttccactggttcacggggttgggaaagccggcgtataatagggaaacagcctgaaggtaaaaaaggagtaatcgtactataaaaggtatcggttgccccgcaatccgtccggagggctttcgcccatcggacagaccacagaggttatcggcttatagtttgggcttgttcttcgggagaatggggcaagaaagtattattctgtaaaatggccccagctcggtctttaccgggtctttcgataccaagaatgttgcgctctccttgaccttcgctatatccaaaatggtcttacagatgtacttattcctcaaacgtgttcctcccctgttgaactgcagcggaaaacctcgcttgtcagtggttttgtgcagaaaccactctttcgggttgttttcatcacagccaaactccagtcggtcgttcattgtgatattcatttcttttgccaatttggtggatagatacatgttgccggtaacgctgttgaaccttatgcttcttttacctacacggttttctcttgtccggcaattctcgacgttgtaaattacaaatttcattttcttgaattatttacgggttatacaaattacatgcttacgtgggcgtaccttttggaaaatccttcgtgattgcggatagtgtcggttatatcgcttattctccggtgtatcgcacttgcggaaatgcctgcataggcggaaaggtgtctgtatgaacatttcgcctcgtactctttcagtctgaaaagctcgtagtccgtttggggatatttcttcttcacaaacagcagtatgtcatacaccagcttgtcggaagctgccagcacctcgacggacggtgtttcttcttcctgcatgagcaaaaagaaatgttcgttgtcggggaaacagtaacaactatccttgtgaatacatttcagtctgcactttttgtacacgccgaaaaaataaggctcgaagctctcgacaggtatttccgaaatcacgacttcccgtttcatcgccaaataggcgtcgtgaaaggcgtcctcgtgcaggtaacgtccgaatatgttacgcaatctctgatagttgtaaacgaaccagttgtcaaaaagcgaattttttttcatgtttcaatttgtttttaagttttttttatttccctccggttcgagcgattaccggaaagttcgattcttttttctgcctcgtctttgcatcacggggtttgcagcaaggattccatgaaaaatactcttggaatggaatgagaaggaagatttttcatcaggaaaatcgaagatgggccttgaggcaaagttttgagatgcaatcaactttgcggaaaaaagtgtcgggctttacggtcgtcggttcgtgatagcatctcaatctacaaaggggggggaagcgaaagcctgcctataaaagacaaggtgtgtggtataaaaggagtggctggaggtacaaggggaagattccgttacaaccgggtatggccgtggcagaccggaaggtgaaaaaatcccctgtccggtgttgtaaccgaacagagggaaaaggttaaatctatgaattatggtcatgccgctttgtcggtggcctcgtgttcggaaagggcggactgcgtgcgttccgcctctttcatgctttcgtcgatccgatgctgtaaagcgttgcactcctgtttgagccttgccaactcgtccgccttgctccacttgcgggcgatgattccctgcaaagcgggtatctcgctctccagcttggctatcttctgccgttgttcctcaatcatgccgggcagcttggcgagggcggcttgcgggtatcgggaggattccacgaagcccagaggcaatgctcccgatatgccacaacggtatttcagtccgcttacgccctcgacgaggaacgtgttgcggtagaatgtaccgcccatgtcatactcgctgtacaccgacaggttcaatccggcatacgtgcctatcgtaccgattgccccgttgcggtaggtcttggaaatgcggtgcagctcccgtccggtctcttccgccgtggcttgtgcgaggttcaacagccgggtcgtccggtctccggtgtaagaggtgatatattcccagtcctgcgtcatgcgtgccgccgcactctcggcctttgtcatgtcttcccggttggccgcaatcttacgctcggccctgatacggtctttcttgaaaatggcctgttccttttcgagctgcataatcttattgtcgagcttcgttttctccaacaggtcggtatttcccgacaggagagccacgaactcggcgaaattcatgccgttatcctcgtccatagcgtcctcgtcgatacggcgcacagcaatcgtaccgttgttaatttggttgatgaacatttgcttggttttcaacaggttaaatttgtaagcgtcgagcgtcttttccgttccgtaaatcaccacgtccacggtattgtttccccagagcttaacggtgttgcctttgcgtaccgcacgaccgttgcgctgctccatgtcggcggggcgatcgggtaggtcaagggcattactgccctcttcccccctcagaaccgtacgtgagggtttcccctcatacggctcaagcttttcaaagtctctgttcgtgtgcagagaccggctcatcctacttcttgtttccattgtttttacgggataatttgaaacattcatcatgaaccaacagattgcatttccgtccgtcttggacggttggcattacgttccatgccttatacgtgtcaatcggttcaccacatatcggacatttccgcccttgcttttcccataggtaaagcagggacttacgtcctttcagtgtcacaagcatctttgacttcattcttttattgaagtacaggcggcagtctgcgtcaaacggattcatatccccttttatctgcgtatattgcaggaaaggaaacgaagatgccagtttcagcaaagtgagttggtcttccttgccgtttgatttcttgaacttagccgcaaaagtccagctgttccctcggatattgtgccaataacggtcttttatccaccgttttcctttcttggaatggcggcgtttagcccattgccacaaggcgagaaatatctgatggtcgattctgtgaaaagaatcacgtgtcgccccatgctgataatatgctccccatcctcggattttagcattcaacattctgattaatgattcctgcttgcaacccttatgaccttttgtaaccttacggatattttccataaagcgtttttcggctttcttggtcggctttgtcaatatttcattgccgtatttgcgaatattgaaaccgaggaaatcgaaaccgtcacgaatgttggttatcaccgtcttttcttcggataaggtcaaacctctttcagacataaagtcggctaccaatggcttgatttctttttcaagtgtttcacggttctcgcaggtaattataaagtcatcagcatagcggacaagattcaccattggcgaatataacttgccttttattctaactcgtttatatttctctgcaaggactttctgcaatccgtccaatgtcatattggcaagcgtgggagagataatgccaccttgtggcgttccctcctctgtcgggaacatctgtttgttgaagatatagccgcatttcaaccattttcggagtattgctttgtccatagggatgttggcaagcaaccattcatggctgatatggtcgaagcacccctttatgtcaccctccaaaatccattcgggagaatagcctttccggagaatgttatgacattgctgtaccgcatccatacagcgacgttccttgcggaaaccgtacgaacgtgtgtcggctgttgtttccgacactggttccaatgccatgaggtaaagtgcttgcatggctctgtctttcattgtcggtattcccaacggtcgcagtttgccattactctttttgatgtggactcttctcaatggcttcggcaggtagcctctgcgtttgagctcacttatcgcttgtgtttttgcttcgggtttctcccatgtttccatgtccaccccgggggtgctaccacctccgttagaagtaactctctttacggctaaggcttttgcgtaaaaagagtgggtcagcgtccactgcaaggctttcaccttgcccgttctgccttccttctgagcctttacaatgcgagcttgaagcttcttaacagcctgctccgctttggtccagtctatcctgtcccaattcgtttgcaagttatcagtcggtgcacacgattggtcgaggagtttttctttgattttatcgttcatttgcattcctactttaaaaaagttctaaaagtctattgtaaagaatcaccatttggcaacattcggtttgttttgcctaccgagtgtcgccacagaagtctgcccactttcgtgtcggatgatgtcgcctacatcagcccgtgatgtcggttcaatccgtatccgttccattacagaacggcattcgctttttctgttatcttatacctgcacaccattcggctttcattgctgtcagcttacctgccatttttacatggcaggagatatacaggcttaccatgttccacatagataactaacggataggttaggttctgtctcatcctccggcggtgcttatatccgtgtaatcctaccatggaaaggattaaccgaccgcttcccttttgggtagagtgtaccagtatcttacactctttcgtgacattacgaagtttactaacagttcgcttgcgctaaccatactatcctgcctcgccactctacggtatgatactaaccgtacttgacttcccctcacggttctgtcttgtcttgcgaaagtgtactttgtcccaaccgcttaatacaactattaaggtgcatcggtggtaggctaccgctgacggaacagcgggttaaagctgatacccgtaagtatcattccaacaattatctatgcgacttcatgtcgcacccaaggtatctccagatgatgcaccgcaacggccctttcttgggcgtttactcccgttcccaacatcgaggtagagccgaacaacacccgtaccctgccactgttcatgtccgcaaaaagtttctttctcgcccgttcggtcttggcgtactggataaactggatttcatcggcaggaatccccattgccaccagcttgtccttgatgtcgctatagatgttccactcgttcggcttgtaagtggcaaggtcgctgaagacgaactgtgtaccacgattggcatttgaacttacataataatcataaatagttcttgcgcaaatcgaagccttgttgttcgggtcatcagtaaacttatcgcccaacagacgcatatcaagagacatcttacgggccacgttggtagcaacaagcatttttgccttgtcgagattgtccggctgcggaatatccaaccccaaatcttcccattgtccgctgtgcgcaaaggcgacgagccgcccgatcatttcctcctgttggatagtgggtgcatgggaaaggaaacgcacgtttttgtccggcacatcgaggtttatcatatcggctgtacgatagtcggtaatctcccgcaggaacatcgccagttccggcactttgatgtaagtgcggaaacgctctttgcgctttatcgtacccgttacgttcagctcgtagtcggcggcctttttcgtgaagatagccgcccaagcgtcgaaacagcttacttgttgccgtttgagttcccttggacgcagatatttgaacatcacgtacagttcggtcagcgcattgacgaccaccgtacccgacaggaacgtagcccccaagtcctttcccgtgcggcgttgaatgtcccgaatggcaaacaaaaggttcatcgccctttgcgagccttgcgcattgccgatgcccgctactctcgtgtggcgtgtctggaacatcaaatttttatagcagtggcattcgtctacaaaaatgtggtctatgcccatcgaacggaaatcgatggtatcgtctttccggaggtctatcttcatctgcagttcggcgagcttggcttcaaggttctgtttccgggtttccagtcctttctgcatcctgccgctccggtaacgcatagtggattgctccagcacttcgaggctgcgctccacatcggccagttcttccgagaatatgtcgtacatggtttcttcggattgcggaatcttgctaaactggtcgtgtgtcaggataatgcaatcccagttgttgttcttgatttttgaaaacacttccttgcggttggcgggggtgaaatcttccttgcccggatagagcaccttggccgtggggtatgcctttcggaatgtatcggcaatctcgtgtacattggctttcagcccgataatgaggggtttctgcaccagtccgagacgtttcatttcgtatgcggccacgcacataatcatcgtcttgcccgtgccgacctcgtgccagcagataccgccgccgttctgcttaatcatccagatagcgtctttctgtgagggataaagttctttgtacgggaacagctcgaaagagaggccggggaacgtctgcgccgagccgtcgtagtgcggacgcacgtaacaattgaagcgctcgttgtatgtccttaccagttcgtcccggacttccaaaggctcatcgtcaagccaccggttgaaacggtctctaatttcctgtatcttggcggcggcctcctgcatggcttcctcgtccggcacacgtattttgctgccgttccggtattcctctttcgttatctcaggtacggtatcgtgcagggcgtgtacaaacaagtcctcgccgttgtaattgcgcacggaataggtattgtatgccacgggcgaatatccctgcagccgaatcaagtaggtatcgttcacgtcgaaatacatcacgtccgcacccactccgaataggtcggaggcgaaatcggcgtacagcttcgtatctatccaccgctcgcccatgttgatgtcgagttcttcatagggtatcggttcgggtatggtgttctccagtgcctttgcggacgcttcggcccattctttctccttgcctgcgagattcgggagaaaggaaagcgtctcttcctgcttggcgatgatgtttccggagaggaactttcctttgtgctcccattccccattggccggattgtagaaaatttccccttgcagggcttcgatgatttcttcttcctccttgttcgtggcttgtgccatgtagcccatatcgaccttgccgtaaaagttcaggctgcttgccaaggcttccacgggggacagcgttacggcggtgtctatcttcttgaaagctacaggttcacgcataacgtcggctttgaagatgtccctgccgacctgcatttctatcgtgaacacctccgtaccgaggctgtcgagcaagataaactccttgttgtcgttgtcgtggaaaaatccccatttggcaataaaagcgtcgtatagggtgttgagttgtttacgcagttccgagcactccttttgttcttcccgttccctgccggacagctcgaaatacaccttgcgtatggggaaatagtcggcggccctgtccgtatttaccttgccctcgtccacgggtacgaaatcaacggctgtctccgtgtaacggctcgacttacgaaaccgaagcgtacctacctgcccctcgaaaacgaccattgcgccgttcttcatccatgtttccatgtcctccgtgtaggcacgtatgcctttgaccgtctgcggctcgccgaaaagagacatctgcacgggggtgttgtcctggccgtgattggcaaaaagagccttgcgaaaatagcggtcgaaatcgtatttgagcagtgcggaaaggtattgggacatggcgtttccatcgcctaaccactggtatttgcggacgtacttaccgaactggttcagcgcaatgcgactgtccgtggcaagggcggtcttggggagggtaaagattttgttcgcatagtcggtcatcgttcctgccgtgtcgaccttttccttggagacctgcaaaaacatcttctcccgtaacgagagcgtcgccttgcggctgtgcttttggaatatcaaaaggtcgctccctacctctatgccgctcgtctgcatgaaaagggtatcgggtagccgtaaggccgttatgaggtcggcatgattgacgaggtactcgcgcacgaacttgttgcccggcgtgtcggcaattcctctcggcgcaacgaacgccagcagtccgccctcgttcaacagttccattgccttgacaaaaaagtagttgtgtatggtcttggctgactgttcgtacatgccgcctttcttccacatttccgcatcgaacacccggaaattgccgaacgggatattcgaggcgataacatcgaagctctcatgctccagatgctggtcggctatcgtctcgaagcctgccgttaccgtggtcgcctcgtcatacagaagcgacaggataagccccgtaagacaatctttttcaaaagcgtagctgcgagtgccgggcatggagacgggcagaaagccgccaattcccgcactgggttcaagaaaggtactcatttgcaggcagttatccttgaatgtagcgtgtatctgccgggttactgcgtccacgaggaatttcggtgtgtaaaaagcagtcaggacggaggattttatactgttgatgacggcttgccgcatggcgtcgtcataatagggatatgcgcctatcaagtcctgcagcttgcggataggctcggccacatcatcgctgacggtatgctccgttcctatattcaatacatctttaatccccccgaaaccggaatatcgggataatacctctttctcttcgtcagtggcttgtcggtcgtcgatacggactttcattgccgttgcaatggcttccacgtttgccaccagtgattttaatttgctgtaactcataatttaaccttgtttgtttccctttattcggcctgtttgcggcctccgggattatttttctgcctcttgaaggtggcagggacaatcggacaaggctgaagcgaaaaaatacgctcgacaacggagaggaagatttttgcgcctcactcgcggcgcagccggcattggcaagattggaacggcccgttaccttcgcggaaaaataataccccgcaggtcgctgcaaggctgggcacggaaaccgacagctaaaagagggaggaaaatgcgtacaagggagaaaggacggaacgggtatagaaaagggagaaagcgtcgtacaacggggaatgctgccgacagaccggaaatccggagaagatgggataagacaagggaatcctgtgcataatcaaaagaaaaacttacccctgtaaccgattataatgaataacctatgactgaaaagaatactcccatcttatctcccgaatatctcgatttcagaaacgagataacctcccgcatccggtcgccccaatacgaggcattgaaggccgtaaacaaagagatgatcgccctgtattgggaaatcggcaggcggattaccgaacaacaagcggccttgggctggggaaaatccgtcatggagaacctttcgcggtacatacaaaaggagtttctgggtataaagggattcggtgtttccaacatgtgggacatggcccgtttttataccgaataccggtcgaatgaaattctccaaccgttagttggagaaattagctggtcgaagcacatcgtcattctgaccaagtgcaaagagatgcaacaacggcaattctacatcttgtcaaccaagaaatacggctggacgaaagatgtacttatcaacaagatagaagcaaagacctacgaaaattatctgctcggtcagagcaacttcgacatgaccttgccggagaagataaagaaccaggccatacttgccctgaaagacgaatatacattcgaccttgtgggcctttcgaaagaacattccgaatacgaactggaacaagcgattataaagaatatccgcgcgttcctcatggagtagcgagatattcagttttttctaactgaaagtgagtacagaaatgttatcatagcatggcagagactatttgtcaatccactcttttagccgttgagccttctctttactaacggttatttttgtgttcggatacccttttaagcggacaataagtttccctccgaaataattagaaagaaacaatacgtattctatgttaattatgtattggcggttggcacggaagaagcaatcaggattgagttgctgttcgagttcgtccattgacatattgacaacttctgaagttccattattaagacgaaggtataccgtcttgttttcggtttcgatatggttgatgtccgaaacacgtacggtcttatacccgtcacgatagggcaacaggaaacgttcccgatagcggaactggttcttctgcaacgaatcgaaaagctgccggagattttcgtcagcataattcttgccagctttggtagctttatctatggcagcttcaagttcatcggcatccaaaggcttcagaagatagtcaaagctattgaacttgaaagcctgtaccgcatattcatcgtatgcggtggtgaatatgattggaacggttgccggagcatatttaagcgcttcaaaactcaggccgtcagtaaggcggatatccgcaaggatgaggtctgttgttttgcctgattggaaaaaatcgaccgcctctttgatatttgtaagtggtccttcaattataaacgtcgtatcaatgtcgttcagcaatctaatgagacgcatggcattgcgctgttcgtcttcaagaatcagtatcttcatagggactgtttttttatgatgggcaaactcaccgaatagaagttctcggcattttctatcttgacttttttatcgcagagcaacgaataacgctctattatgtttttatgacccaagccggtcgattccatttttgagagcaagggagatttaaggttgcgcactgtgatatagtcgtcagacaacgtgatgtcaataaacaacggattttccatcgaaaaaccgttatgctttattgcattctccacaagaagttgcaacacggccgggggaaggtatcctttgcattctttcagttcgaggctgatgttcgtgacgacccctccgacgtggcgcacctgcatcagatacaagtatgattcaaggaactttatctcatctctgacgggaatcagattccggtccagattggtgatgatgtaccggtacactttcgacaggttactcaggaacttgccggcaagtttggtatcttcctctatcaattccagcaggttgttgaagttgttgaacatgaagtgcggattaatttgcagcttcagcgagttgagttgcgactgtaaggcaatctccttctccttcatcagtgccatttcaagagcctgcttctcatcgcgcgccctgatgtatgactggaggtagaatgtgttggcataaacgcttgatatgaaagtggctatcatggcaaaagtgtaagcccccttcatgttgatcagttcgtcaagaagcccgttgccggtttcatcccacaaaagattgaacagagatgtcatgccgaacgtaacgaggttattcagcgtcaaaagacaggaagcatagacaatcacccacacataagatgttctgaacggcaaaatcttaaaaacaaggtaagagaaccccaaggatatgtaggtaaagagcatacacaacaaaaaatcgacgacataatcgactgtcgccattcccggtaattggttggcggtttcgtcatcaagaattaaccatataataaggtagaggatataggaaacgagcgatagcaggaagccgttccgccagttcattatttttacattttctttgatcatatttggttgcaaagttacttcatgttgcaaaggtacgactttgctttttcatttgataggtcgaaaccggatgaaacagacaaaacagcagttgaaacagataaaaggagtgtcgagacagatggttctatcatttatactgtattcgatgcttgcataatgaacgtagattgccaaaacagggtatgattttggtaatctgtaggaaggtgacgcatcaagaagcatggcttaactgcccaaagatgtgcatctttgaaaagagcatttacaatgacatttcagaagccattttagctgttttataaatgtttttttccgtttcgactgcatgccggttgtcggcaaattgggtatggaatatctttgcagccaaaattggcgacttatgattattgaaacagaacaccttatcatcagagattttcaggagaaggatgccgttggtttgctggaatacctctcccatccgcgtgtcaactgcttcgtgagcgaacgcttgtgctctgaagagtctgcactggcttatatatccaatactccaaaggagttgctgcgctatgccgtgtgcctgaaggaagacgatttcataatcggtgatgtttttgcattgcgtgaagaagccgacacattcaacgtgggctggcatttcaaccaacgcttcgagggcaagggattggcgcatgaagcggcaacggaatttctggattaccttttccgtgaagcaggcgcacgtcgcatctacggctttgtggaggatgacaacctgcggtcgaaaagattgtgcgaacgtctcggaatgagatatgaaggatgcatgaaggaattcatatcgtttgtgtgccatcccgatggaacaccacggtatgaggacacctgcatttatgcggtattgaataaggaatggaaaaacaataagaacagatgatgaatagaagaacatggatagccggcatcacggtaacaagcctgctggctgcattattgacagcctgcaaacaagaacagagggaacaggaaatgagacagacattgcccgtcatggtggtttcttcccgggcagttgaatttcaagaaagttattccgcctccatccgtgggcggcaggatgtggacatagtaccccaagtgtcgggccgtatcacccgcctgtgtgtgaaagaaggggagcaggttaagacgggacaagtgcttgccgtcatcgaccaagtgccctatcaggcagccttgcgcaccgcacaggcaaacgtcagcgcagcacaggcaaaagtggaaacggcacggatcgagctgcaaggcaagcaagccttgtttgatgagaaagtcatatccgattacgaactctctcttgcccgcaacgggctggcggtagcacttgccgaactcgaacaggcaaaggctcaggaaacggatgcccgcaacaatctctcctataccgagataaaaagtcccagcaacggagtggtaggcacgcttcctttccgcatcggcgcacttgtcagtcccggcatgacgcagcccttcacggtagtttccgacaatgcggaaatgtacgcctatttctccgtctccgaaaacaagctgcgtcagttcaggacacaatacggttccatagacaagatgatttcccaaatgccggaagtcggcctgcaactgaatgacggcacgttctacggacggaagggacgcatagagactgtcagtggcgtggtcaatgccaccaccggggcggtgcaaatcaaagcccgcttccccaaccccgaccgtgagctgctgagcggcaccatcggcaatatcgtcctgcaaggagtggatgcggatgccatcctgctgcccaagaccgccaccgtggaattgcaggacaagattatcgcctaccgcctcagaaacggaaaggccgaagcagcctacctgaccgtggaccgtctgaacgatggtaaccacttcgtggtgaagcaaggtgtgtccgtgggcgacaccatcatcaccgaaggggtaggacttgtaaaggaaggaatgattgttacacctaaaaacgtaaccccatgaatctacgatttttcatagaccgcccggtattctcgggcgttatttccgtggtgattgtcttgatgggactcatcgccatcaaagtgctcccggtggagcaatatcccgacattgcaccgcctactgtcaacgtgttctgtacctatcccggtgcgaatgccgaaaccgtgcagaaagcggtaatcgtcccgcttgaggaagccattaacggagtggaggacatgatctacatgacctctaccgcatccaacacgggcgatgcttccatcaacatctatttcaagcagggtgccaacgcggacatggcggcggtgaacgtgcagaaccgtgtgaatggcgcgttaagccagcttccggcggaagccaccaaaagcggcgtcacgacagagaaacagcagaatgccgagctgatgactttcgcgctttactcacccgacgaccgtttcgaccagactttcctgaacaattacatgaaaatcaatgtcgagccacgggtgaaacgtataggcggtgtcggaaaggcacagctgttcggctcgaactacagtatgcgtttgtggctcaaaccggacaagatggcggggtacgggcttatcccggatgatatttcggcggtattggcacggcagaacattgaggccgccaccggttctttcggacagaactccgacggggcaaacgagtacacgatgaaataccggggcaggctctcgactgcggaagagttcggcgaactggtggtcaagtccctgcccggcggcgatgtattgcgattgaaagaggtcgcggatatagagctgggcgatgagtattacaattattcatccgaagtgaacggacatccggcagccatgatgatgataaaccagaaatccggttcgaacgcatcaagcaccatcaatgagatacacgaggtactcgatgacctcagccgcgatttgcccgaaggggcagagtttgtggtgcttaccgacaccaacaagttcctgaatgcctccatccattctgtcatcaggacgcttatcgaggcgatacttttagtcatcgtggtggtgtatgtgttcttacaggacatcaagtccacgctgattcccacgatttctatcttcgtgtccatcatcggaacgtttgccgtaatgtcactgataggcttttccatcaacctgcttacgcttttcgcccttgtgcttgccataggcacggtggtggacgatgccatcgtggtggtggaagccgtgcaggcgaagttcgacgaggggtatcagtctccggtgcttgccgccgatgatgccatgaagggcgtgtcgtcggccattctgacctccacccttattttcatggcggtgttcttccctgtgggcatgatgggcggtacttcaggggcgttctatacgcagttcggtatcacgatggcggttgccgtgggcatttcggccatcaatgccttcaccctttctccggcattgtgcgccctgctgctgaagccttacattgacgagcacgggaacacgaagaacaacttcgcggcacgcttccgcaaggcattcaatgcggtttttgaccgtttgagccgtcgttatgtgcgcggtgtgctatatgtcattcatcgcaggtggctgctgtggggcactatcgcggtatcgttcgggctgttggtgctttttgtcaatacgaccaagaccggacttattcctgaagaagatacaggcacggtcatggtcagcatgaacacgaaacccggtacatccatggcgcagaccggcaaaaccctaaaacgtataaacagccgtcttgacagtatcgcagagattgaatacaacggtactgtggcaggcttttctttcagtggctcgggaccttcgcaggccatgtcttttctcactctcacggattgggacgagcgcaaaggggaagggcagtcggtgaacgatgtaataggccgtatttatgccgccaccgccgatattcccgatgccaccgtattcgccatgtcgcccccgatgattgccggatatgggatgggcaacggttttgaactgtacttgcaggacaaaaacgccggagacataaccgccttcagccaagtgaccgaccggtttgtggaagcgttgtcgggcagaccggagatcggtgaggtctattcatcgttcgcggctgattatccgcaatactgggtggatatagatgctgccaaatgcgaacagtccggtgtgtctccttccgatgtcctgtcaacactctcgggatatttttcgggagaatatgtatcgaatttcaaccgcttctcaaaactgtaccatgtcaccatgcaggctcctgccgaatatcgcatggacaccgaatcgttggacggcatgtatgtccgtacttccgacggctccatgtcgccgttgagccattttgtccgtcttaccaagaccaacggtccgtcggacctgacccgcttcaatatgttcaatgccatttccatcagcgggtcgccggcaacaggatacagttcgggacaggtattgaaggccataagggaaactgccgaccacgttctcccgtcaggttacacctacgagttgggagggttgtcgcgcgaagaaagcaatacgacgaacaatgccgtgtggatattcgtgctgtgcatggtcttgatatacctcatactgtgtgccctctatgaaagcgtgttcatcccgtttgccgtgttgctgtccgtgccttgcggtttgatgggcagcttcctgttcgcgggactgttcgggctggagaacaacatctacatgcagaccggactgattatgattatcgggctgcttgccaagacagccattctgctgaccgaatatgccggcaagcggcggtcggaaggcatgaccctcgcgcaggcggcatacagtgcggcaaaggttcgcctgcgccccatcctgatgaccgtattgtctatggtgttcggactcgttccgctgatgatggctcatggtgtgggtgccaacggcagccgctcgctcgccacgggcgtaatcggaggtatgatagtaggtacgctggcactgctgttcctcgtaccgtcactgttcatcacatttcaatatattcaagaacggattaaacgtaattaaatgaagaagatcatcttatttaccatatcaaccttgatgcttaccggctgtggcacatacagccggtatcatcgggctgacattccgacagagaagctgtaccggaacatcccggctggcattgatacaacaacgcttgcatccatgtcatggcgggagatgtttaccgaccgtaaacttcagtttttgattgagacaggactccggcagaataccgacctcaatgtggcacgcctgcgagtggaagcggcagaagccgccctgatgacagccagactgtcgtacctcccttcattgggaatcagtgcggaaggcagtggaaacaaatatgacggagctacggcaaaggcgtacaatgtgggagcgtccgcaagttgggagcttgaattattcggcaaacttacggcagcaaagcgtggtgcggttgccgcattgcaaggaagtcgtgactaccggcaggccgtacagacacagcttgtcgctacgatagcggacagttactataccctcgccctgcttgatgcgcaaaaggtgataaatcatcggactttggaaaactggcaggctaccgtgcgcacacttgaagcgttgaaaaaggtgggcaaggcgaatgatgccggtgtgttgcaggcaagggcaaacgtgatgcagctggaatcatcgcaacaggctatatgcaaaagtatctctgagacagaaaacgccttgtcggcgatacttgccatgccgtcgcactcgattgagcggagcgatttggcagaagcgtctttccccgatacaatctctgtcggagttcctttgctgttattatccaatcgtcctgatgttcgtcgggctgaaatggaactggctcaagcgttctacgccaccaatgtagcccgctcggccttctaccccaatatcactctttcgggtacattgggctggaccaacaatggaggcggggtaatcaccaatcccggacagtggctgttcaatgcaatcgcttcgctgacacagccgttattcaaccgtggaacaaatatcgctaatttgaaaattgctcaaacccgtcaggaagaagccagattgttataccaacagtcattactgaacgcggggaaagaggtgaatgatgccttaaccgcatggcagacggcaaaatcgcaatttgaaataaacacccatcaggttgaaaccttgcgtgaagctgtgcgaaagacggaactgttgatgcgccattccggtaccacctatctggaaatattaactacccaacagtcactccttgaagcagagacaaaccggttgcaaaccagctttgaccgcatacagagtattatcaaactttatcatgcactgggaggtggaatataaattagaatcgggtatcgaaaataccttttgacattgattacggaatcagaattgcaatggaagttattagtgggacatggaaaagttgtatcatttttgagctaagcgatggggctaaatgtccgagcaaattacacaaattgtttcctgaagccaatgctcgtgttataaatcagcaattaaagaaattggaaatgtatggaatcatagagaagaaaatatttgcggaacttcccccacattccgaatactcgattactccgataggtgaaacccttttgcctatcattgagaaactggaagagtggggcaatttctttcgtcccaatatggaaaaaatattaggaatgtcagcagacaaaatgtaattcattcctttgcttatatattacacagtaataaattgcataaatacatgaaaacaagatatttcgagaagacattgaaacaggtgaacggcaggtgcaaagctcccgtggcagagaaaactgccggttgtacaggtatgtcggaataaccttatcccaatgaatatggaagcaaagctctggttcatggttttgtgcggccttgcagtcctgctgtcgtatcttgccggtttctggcgacggaagactgcagctgctgcgttcgcagcagcacgagcagccgctaccgccaaagagcgcgaccgttattgccgtctggcggtactggcgggccatcgggaagcctgcctcatgttctgtttcgcccgttcggactttttcgaggaccatcagccgctcaagccgttcaaatcgcacggaataaaagtcgctttctatgggtattactatccttcacggtacgccgacctgatcgacgatgaacagcgggcgttctgctgttccctctaccagttcaaagagggcgaaaatcacggtatcgagttttttaaggcgtgcatgtccgtcttgaatttggccgatgccccttaccacatcctgtttatgccgtgcagcgacgagttcaagtatgcccggcgattcaaacggctcgactggtacatcacaacccaccggccggacctaagttcgggcttatatgatgtcgatgtgttcgagtcacgcgacagcttgcacgaggcgaaaggcggcgaaaaccgtatcctcgaaaggaactaccgtatcacggggaatatcgaagggaaacagattatcatcgtggacgacgtgctgacaagcggacagagtatggccgactacaaggaggagatagaaaggtgcggcggcaaggtggtggcggccatcttctatggaaaaaccgttacccggccgcctctgcttctgataaaggcgcacgtgtggggtggctgcatcgtgaacaaaatcaaggaactgacgaaatgaaagaatgactattgttgaaattcgtttgaacatcatcgggaaaaagccttatcctttttatcaaggggtggtagaaaggggacttgaacacttggaaacggttttggaacattggaaaaagaatatatgacatggaaataaaacttattacttctaacaagaaacaattcttggatttgctgttgttggcagatgaacaagaaagcatgatagacaaatatctggaacgaggtgagatgtttgccctctatgatgacggtctgaaggctatctctgtagtgacgtgtgaaggagagggtatttacgaaataaaaaacatagccgtttgtccctcctcccaacgcaaaggatacggaaaacggctggttgattatctctttggatactatcagggcagatgttccgtcatgcttgtcggtacgggagatacgccatctacactctctttctacgaacattgcggctttcgtatctcacaccgactgaaaaatttcttcacggataattacgatcatccgatttatgaggatggaaagctgcttaccgacatggtgtacttgcggaaagatttctcttaattcatattttgaatggaatctcatttttcacatcatttattataagtgatttgtgattattgaattatatctctatttttggaaacgtaattttaattttcccgaaaaaccaagaataatagggacaagtatttttagtcattacattaaaacattataatttatgaagaaaatcgtattgacttgtgtcctcgttttttcagcctgctgtgtgaccctgtttgcacaaaaggacaaaaaagaaaaggaaacagtgaaaatagaatgttgttgcgaggactgtacctgccgcaagtgtaaatgcgatacggactgctcggaatgcagaggttgtcgcaagaatgaagaatgcagaagttgcgtagattgtgatcatgaaggtcgttgctgcgattatcatcgtcatcacaagaaacacagaagaggcggatgttgcggaggatgttaaacaatcgctgccccaaattataaaaagtgaggttgttcacttcaaaccggcacaacctcactttttatgcgcaaagaggcgatgtctccgtatgcggtcattccaaccaatggaatcttgaacaaagcctcccaaattttcaactggcaatccgtttctttcaaatgccgttttatctctccggtcctgcatgaaaataaacagggcgttctgccgtatgccatcgcattttgtgtagaaccgggtgtgctcaatctccaagagactttcttaaaaacaagtttcattacttgtttccttttctcaccctatatcctgtccacagacaccatacgcatcctcctcccacgaggaagacaaacacgtaagtagccacgctgcctatgaacacccgtccgctgtgtacttccaaagcgaagttccaaagcgacatgggttgtgtggagagttcgccgggctgggcaagtgcatccgttccctcgtaatattccaccacgcattcctttcccttgaaatccgcactgtaacccgaaacggcaaacttgccgaaaggaggaccggctgtatcttcggcttcttctcccgtgaagtagtccgttacccagccctgctgtctgtcccaaacgaacaggccgctgaacgaaccggccagccagttcccctgcttatccttttgccagacattcagccccatgacactgaccgggggagcttcctccaccttcacgggaacggcatccggtgaagccagcgaataaaaaccttcggaagtggagagcagccagtcaccgcacatatcgtcatagcgcaccatgcgcagcttgtcgtgccaaggattagggctgtctaaggatgtgccgggcagagcgggtgtcttagtcagagccaacggtatcatgacgggtggacggagacaccagcccgtaacggccaccaagagggtcagtatgatagtggtgcgtcccagcttgtcgtgccacagcagggagaggcgtgtccatcgggcttcgccttccgtgtgccgcccgtggcggtggcggcggcgcatgtccttgggcagcagccagtaggcaagccccgtgaggcacaggagaaccagcacaacagccaccgcatccacaaccagcttgcctgccgtgccgaacaactccccgctatgcaacatccacaccgtgcggaaaagcgtcaccttcggctcgtaaccgtcgggaactttcacctgtattttccgaaatccggcgtgagaagacgtggagagatagaggtacgaacgtccggcaactaccagcgtgtcgccccggacggtgatgtccgaaagacgttctccctcgtccaaaggcagggggatttctatccaagccgttccgtcgtggcggtacaggccgaactggccggcggcatacagcgtaccgtcgggtgtttgcactatgcctttcatgctacggtagtccgccccttgggaaagtccttcgttgaagtccgcaaaagccgaggcggcagtgtccgtgcgccataccccggctgcaccataggccagtatatgagccacggaatccttgtccgtatagcgcagcgttcccctcagcagcccgccgttccatgcttcgaaacgataacccgcaggcagccacttccggctgacgttgatgtcggccaccgcttcacgatgattcagcacaataccgctccaacagaacatgagcatgaagaagcagaacagcaacccgaaccatttatgatgtttcctccaagttatccgtttcatgatttatcttttattgtcgttttacatccgcagttttctttcgtctgtcacaagcgagataaagcccggttactgcaaacgaaaccagaatcaacgcgatttcctgcacatgtccttgtggatttgcccatagcccgttcagcaggtgaatccggtcgaagacctctaccgcgatccagaagataattacggtggcgaaaccgaaacgcaggctcatgccccacgaagcataacgcaacagcttggcgaacatgaacagcgaaccgatgaagcccagcatcccgacaagcaatgtcaccggatgatggtcgccaaaaaaacgctcatcgtagcagaacatcagcaccaagtagcacgtccacagcatggtaatgacttccataaaagcgacaatgctggtatggcgtgtcatggggcgtgcggcgatttccttcttgtgcttgccgaagaacaagcgctgccaccagttcaggaaattgcagccgttggcagtgcagaacaggtacagcatcatcgtcatggcccagaacccgaatgtggacggaagtatcaggtattccggccggctgacaatctcgcccgttaccgggtcgagctgcgcctgcgtgccgaaacggttggcatagtacataaacaggaagtcgatggcgcccatccagtaaaacataccgccgaacaaacccaacagcgcttgtttgacgtcgccttttatgaatacaccgataatgaccatcagcaaaccgaacagccccattcccataccggcatagaactgttccacccccgccgtaccgtctttcagcgcacgtgccaggatgtgtgtcagcggcatggcaaccaatgtcacagcgatggagacaaacgctttaagccagtgcctttttctctcttttgttgctgccatatccggttttctttattgggaaacggcattctttttcttcgcacccatataccacaggtaaacagccagtacaaggaacgctgccagtatgataatcatttccgtcttatgccccatagggtctacccatatctcgctcaacaaatccatacggccaaggatctcaatcggtgtccagaacacgataacggtagcgattgccatacggatgttggccccccacgcagaaaggcgcaactgtttggcgaagataaagaacgagccgataaagcatccgacccccaccaacagtgtcaccggatgattctcgcccaggaatacatcatcgtagcagaacatcagcaacaggtaggaagtccacagcaacatcatcagttccatgaatgtgacgatactcgtgtggcgcgtcatggggcgggcggcgatgtcgttcttcttaccacggaagagcaaccgttgccaccagttgatgaagttgcatccgttctttgtactgaacaggtacattaccataatcatcatccaaaaaccgaacgaggcgggcagtatgagatattcgggacgggttacgatttcacccgtcacagggtcgagttccggctgcgtgccgaaacggttggcaaaatacatgaagagaaattccacccagcctgtccagaagagcagaccgccgaagaatccccagagtgtttggcgcgtatctcctttggcgaatacgccgacaatcaccatcgccatacctaccgcgcccatgacaaaggccgaatagtgcagaacggtctcgctcatcagatgctccatgataatcatcagcccgtgccccaaaggcatggtaaacaataccatgaggaaagaagcgatggctttccaccaatagcgccgtttggcggcaggaggtgttacatttgttgtttcagtggtcgttacgttagtcttttccatattccattaatttacgtttgatacgtttcttgtagaatactataataattgccgcagcaaccagcatggcggcgtgcagcgtaattgtaaactcccaagtgggagcattggggctgtccccgtacttgtctgccatgacgaagtgggcgaccgttatcgccgtcaggaagacgataactgtcggccatttcacccaccgccggttgcagaagcgcataaagcgcacgaattgtcccatcatactttccgtcatttcaattcgtcgcaatagtaactgattctcccgccttcatcaccgatttccacgttggcatcgtaccaactgataatctgtatcttgaagtacctctctccgtcggcggtacgcaccacatacgtgtggaacgaaggggtgtatgtggggggaggcccggagaagctcatggcctgcgacagcagcgggttggcattggtctcggtcgtggcaggaccgttgttggggtcgaaccacgggttggcatcgaagtccagattgttttccacaaggtaatggttccagtcgttctgcgacatggtgacgcgcacgtcgtccgtgtcaacgacccattccaagtcggaaggcagttgtgaaacgctcgtccagtcatcgtaaccgccatagcccaagtcggcggcaccgccctgaccgatgccgctcgtacccgaattggtacgcatggtatagccgcagaaagccagatcccagtccgtgcggttgatttgttcgccttccttgatgtccttgttcacggtgtaagtgttgaatgactctcccgtgcggaggttgaagtatatccagtcgttcgtcacccctgtggaatagcccgacttgcggggcagcgtcttgcccgtaaagggctgtatgtcgtcatagtccacgcaggagaacatcgtgagacagcccagcaggaggcttaccgttttgaataatcccatacgtttcattgtcgtatatttaatcatttctttttccttaaagagttaatcacatcgtccagcataaattccaactgcacccatccgcgtgttcccggcgtggcgggcacgttgaacatcgtgatgcccgaaccgagggttttcggcacgtagttgaagatgttgtccacaccgagcgtcagttttaccttattgtagaaggtctgcgacaccgacaggttgcacagcacgtattgcggcaggtcgcaacggaagtaggcgtcatagctcttgttgtcctcttccacgaacacgcggtcctgcacgtcgaacttcttgcgtcccatgtacgaggcgctgaacacggcgttcaaccggtagttcttcttcgtgaacttgtagtccagactggccgtggcggcatggggagaggtggtgttcacctgtatgccctcgttcttgctcacgttcacgaagctgtacgtcccgttcagcgtcaggcagtccagcacgtgccagcgcagcaaggcttccagccccagaaggcgttgcttgctcaaattggtgtactcgaagttgtactgcatgtcgtagatgcgccatacgccctcgattttatcacggaaatagttgccgtaggccgtaccggacaggaacaggcggtcgttgctgtactcggctcccagcgagaaataattgttcttttccggttgcatgttctcgtttccgcggatcatgaacatgcccaaatggtcccagttgaagaagagttccttgatactcggagaacggtatcccatcgaatagttggcgcggatgctccaccgttcgttgggcgaatacttggcggcaatcttgggcatccccatgaaaccgaacgccttcgagaagttggtacgcagtccggcagataccatccacttggggttgatggtccactcgtcctgcaagaaatactccgtttctttcaaggcgcgggttttcagatcgtggttggcattgccggagaaacggtcggaggtcagttcgtccgacgtatgttccacaccgaagatcaggctgtgcccgtcgaagtagttgctcgtgatggtcaggcgcggctgccagatgctactctcgtagtccttgttgcgcgtgtcgatgcgctcgtgccgcttgaagcggtcgtaaaagtcggcatgaaggctacccgtaacgctgaaccagtccttcacgtggtaggtcagcttggctcccgccgtccagtcacgcgcctggctgaaagtcatgtcctgtatcaggtcatacgtgttcatgaagaaggtgctcccgtaaaccaagaccgagaggtcatcggtcgggtcgtaatacagtttttgggaaaccgtgatatgctccttgccctcgatgcccatcggcggacgtgaggacgagttgaccacggtgatgtcgtgcggaaggaagggattggcctcttgcgtgtagaccttcttgtcattctccgcctgatacatgtagaacgcatccgaggaactgtaccatgcgtcggtctgcgaggttactttccccgccttgaatccggcagatacccagccttgcaggttggggcggtcggcattcttctcgaacatatacaaaaaatccttcggttgcggattcttgtaattgcgctcgttcatctgtccgtagcgcacacctgcgtcgatggaaagcggtttggtcgttttcttcgtgataaggttgattaccgcaccggcggcacgcgagccgtacagcgtactgctggctccttttacaatctcgatacggtcgatggcgtgcaggttgaaacgctcgtagtcgagattcccggccatgtcgcccgtcatgcgctcgccgtccatcaggaacagcacgtggcgggcgtcgagcccctgcatggagatttcgtttccgaagcccaccttctggatattcagaccgggagtttcctgctgcaatgcctgttgcaggttgctgtatccggcttcgaccaactgcttgccgcccaagacttgcgtcgtaacgggcgacatcttgatgggtcgcgctgtacgcgaaccggtgacgactacctcgttcagtcccaaatgatcctcttccagatagacggtcttctcggtttcggtcgcttctatctttcctgttgccggaacaaaaccgacataggatattttgtaataatacgttttcttggaggggattttcagttccgccagcccgtccacattcgtgacgctcccctgcaggttttgcaacgcttcgttatcggcatagaccacagtggccgcgatgaccggctgttccgtccctttctccagaactttgagctttactttacgttgtgcctgggcattcatacatgccagtaagacacaaaataagatggctgttattcttttcatctgtctatcatcaaaacatgttattctacacaaaaaagagggaaagccgtgtgtcttacggtctttccttctttcctgcaatcgaaaggtcaagccttgccctgttctttcttggcttcttccaagtctttttcgtactgggcaaattcttcttcaaagcggtcgatacggctcttgtcgatttcttgcaggaaggtttcggtgcgcacgttcatcatgttgtagtccacgatgaactccacttgcttggtgtccacgttcaggaaaccatctacacgggcgccgctcccttcctggttgtccgcagcgtcatcgccgctcgtggtgacatttccgtccgttcccacgaacttcacccaaccgctgccggggtattcatccttttcccaactgttgagttgcataaacttcgttgcacagcggaaggtgatggcgaagggcatggcgcccacggtgaagtcgctcaggtcgagcaccatcgtgccgtcttcccgccaagaaaagttgaatttggtggggcaaccgctttccaacagcgtcttgtccacaccgctcattgtagcacgggttgagagcacgaggtctcctacaaggatttccttcgccttatcaatatattcctgtgcaggtggctcattggtaagtgaatcgtcactttcacacgaacttaatccgattactgttgccataagaaggctgaataaaaagtataactttttcattttgcttatataatttacttgttttgtaatccataattgtttcctgttcattacccttgcctgcgtgtattccgcaaagggtatgtaaagtcatggtttttacatgattaaaggcaggctttttccgatggcaaagtctgtctttgatgtgtaccgcatgtaggcttcagaagcggttcaggcggtttggataattttgtttcctcgccgtcggttgcataccggaagtgtttttagcggcatagcagccttgctgacaggataatggtgtcttccccattgggtgaggtgaatatattgtgataattttttcttagtaacacacaaaaaaagagctaagagaaagccgtttgacagctttctccttactctttctgaatttaatttcgttgcttgacaaaataatgacgaattattttgttccaacaaagtgtacggatgcagggaaatctgcacctaagaacttaccggatactgccagagtaaactcgatagtgttgcctgtaactttggcatcagtcaaagaatctaacttcaatgttactaaatccatgcctaaaatggtcaaagttcctgctttatcacctttgaaagctgtaatttcaccggtttcttcatctacttctacttccaactcgatagtgatattccccggcatacttccgatctgcggaaaatcgcaactcaaaataccattttcaagagtataagatgcagcacgtggctcataatcttctcctctcattttgatttgatccattgtaccgttataagtaccttcgtaatcgctgattgccaatacggtacttacaccatctacatccatcactgtggcagcgtcagcagactgtgccattccgaaacttgctgcaacaagggcagctcctaagaaaaattttcgcatcgtttttataattaaagtttaataaaaaaataattacactttatttttgtttgttcaataaagtcctccaacggcatcctttgtttttatcatacgataaagaagaagtataacctaaccttctgaccgtatcgtctgggtcaatgtctgtataatttgctttcaggaatgcttgggttgattctctatagaaagtgttctctgaacaagcgaaataagtaccggcatatccatcttcactatagaaaatggtcagttccggataaaccagattaaagtctttattcaaatcacctatactgagttctgctaccatcttgacattcgacatgtcaaatgtttccaatgcgtccaagcattcaatatcaattctgtaggctttcaattcatttttttcgggcaatttgatttctttcagtataggacatcccagaaccatcagactactgccatacgtaccattgccttccgtttctttatctccttgaccccaaatagtggaataactcaaatctaacttctgcaatgccgggttattttggacccaagcacttcgcaaatctgtagcattggataagtcgatatcttccacttctatattttgcaggatgacttgggttatgaatttccctacttttatattgggcatagaagctatactttcttctccggcagaataaaggctgattttagcaccttcccaataaggattctccaccagaaactgaataccctcaaagttggtaacattatcagcaggagcaacaagcagttcctttgttttctggtcgagtcccaaatgtttgctaaggtctatttggtcgccgttaaacagatcggcaaaatttgtctgcaaataagtgagcaggtttgcgtcgggcacgtcgcgcagggtggtataagtttgcagattgccgtcgacatcagtcatcttcatatcaatggtgccggcggtgatggcttccttgttttggcggtagaaacgcacgagatcttcgatattctctttagcggtttccggaaggtaaagtttggtaatttcgtgcaggttagtcacagtttcatcaccgttttcttccactacgacactcacaagattatcatagtcgtagatttcattacccgtcaggtctattccggtgatttgttccggcaatttggcaaagtcgaacgccgggccgtaaccattgtccgacagatccacatcagtcaagttagggaacatggaaagttctgccagtgcgtctgtggaaatctgcgttccggagaggtcaagcgtcgtcgtattgttagccaaatcatcaagcaacagattgccgtcctcgttgaatgtgtagcctctttgaacaagaatggttttcaattcggtattctgcacggcacccgtgctgtatgagagggtgttgtcgtcatcgctgcacgatgcccctatcagcagcattgcgaatgccatcaaaccgacatgcaaattgtttcttttcatctttctgtgattttattatttcgttattattatttcggggtgcaaaattataacgagtttactcagagcacaatacctaaaaattggtatataattagaagcaaatcaccactcattaactaaaaaaatataaacttcgctcctgctttataattgtttgttaaaacggtacttgaaggagagcatgaaccaactacctatctgctgcgtgtgtctctccgacaatccggaggaagagacgctgcgggtaaagttctttttctggctaaggatgtccgcccagtagaatgacagttccgccttcttctgtttgaggaaacgccaagaaagggaggcgttccacactacctggtcatcttcgccgggggtgatgttcgtcccgttgcggaaagaataatcgacatcgctccgcaactgaatgccgccgggcaggtcggcgtaggcgttcacccccaagcggtagtcgcgggtgtaatcgccggtttcgcgcaaaaggttggtggagtggcggaaacgccagtcacccgtcaggtcgaaacctccccattggggctggtagccaaaacgcaggttggcattcagtgtcgtgttgtgggtcgtactgcgctccggcatctcctgctgtccctcgttgataaggcttacgttctggctgaacgaagcgccggtacgtgcggtaacggaaaatcggcgtttgatgcgcttctggtatcgcacggtggctcttgcgttccaattcccgttcacattcacgggatagctttctataccgcctgtttgggtattgtacgtcacagcccgtgtcacactgttcaccgtgttcgcccaagtcatgtctccgttcaaacctatcttcgtgtctcgtgcttctaagcgcaccctttggttgtacgaagggcgcaggctgggatttccccgtgtaatgttcagcggatcgctgttgtcggtcagtgtcagcagttcggtcagtcccggctgtttcgtgtctccctcgtaacttagttgcacccgtgttttctttttgtgccacaagacggtaacagccgggtagtagttcacggaggttctcagcgtgtcggcttgcatccgcccggtcttctggtcgagactctgccgttcgggaacgacggacaggccagcgttgatttcccaagttctgtccgtatagttaaggtggagggccacttcatgcgctgtcgtgtggcttcggcttctgttgctcaggctgtcggtataggctgcctcgtagccttccggcagggtgtacaagggttcatcgtccgtaccgtcgaaaaagcgggacaggtcgtaggtattgcggtcgttgttttggttttcccgtctgaatttatacgaaagttgtgcccgcaggctcttgtgtagtggctgtgtcagtatcagtcccaagctgaatttgcggtttctgtttgggctgtcataatattgattacggtagaggacggaatcgttaccccactcatcctgcaattggtaataggtggtggaggacacggaaaacgcctcgttctttcctctcccctccgagtattgcatggttagccccaaactgctgcctttctcgttcagccgtcgggtgaggtcggcgttcaggaaatactgccggttggcgcttgttgaacgggagttcatgcggatgccattcacccggatatcgttttccgtttggccgttttcttccccattgaacggtgctgtgatatccaattctggattttcattgtaggtcgcctgccggctgtcactcccgtttgtccctttcatcgcactaaagctgcctgaaaggttcagcaaggtcatcttatcgatattccatttcatgcttagcatggtgcttgccatgcggttggtgttgtggcggtcgctggtcgcatagcggtagcggttccccgttttcaggtattgctcgtagtaagatgtcccctcgttcccattgatagcattgctgtacatgacattcccgttaaggtgtatcttctttccgaactttttcaggaagttcaccgctacattgtcttggcggttgtctttgtttgcggatgtcatgttgcggttgccgcttttggcgattaccgacaggttttccccgccggttttgaagaaattgctgattagttccgcttcttttttcttgttgttacccttgcctgcggctacggaagtcatcagtgtaccgttgaactccttcttggtttgcaggtcgagcacatagttttcttcccctgtttttatccccatgaatttctccatttcgctacgcttgtcatacacttttatcctgcttaccaaatcggcgggcagattttccaaagccagcgcatggtttcctgcaaagaacgcttccccgttaacattgatttccgcaatgggaagcccattataaaccaaggttttgttttgcctgtcatattccaagcccggtatcttttttaccagctcttccaagttcgagccttcgggaatccggtaggcatcggcattgatgacggtagtgtcgcccaccagttccacctcctttatgggagccgtgaccaccacttcggacagttcaagaccttctgtcaagacaatgtttccgacatggattttcgtcttgcctgtatttaatgcacgaaactccggcttcatacctatataagaaactttcagcaggtaaggcgattctttctttgcatggaagctaagacggaaattcccgccggcatcactcatcaccccttttacaagggtggaatccccggcttcgagtaccaagatattggtatagggcaacacctcttgtccttctccattgttggaaacgacaagggtctttccggtcacatccaccctctgttgggcaaatagagttatcggaaacaggaacataagtatcagtccgagaacagatatacgcacaattacccgttatttttttatagtttttaaaagaaatgaaaaacgggtacaaaattacaagcttttaccagccgtgccaataccaaacaatcggtatatataataactcattactttaaccttcaacatataaaaaatggtcggaacgatacagagtacaagaaaacctgccgtacaaccgggtcttttccagagcatggcgtcatgtatgaaccggacatttgtcgtgcaaatgaaagccttccaaagaaacaaaccccagtccacaataaaaacaaatccggcaaccgttcttttatagaaccggctgccggacgagccaaattgcggaaactgttaccgtttcccttccagaatcagaatcggccgacccgcaaagcattcacgaaagcgctggcctcttctcccgtataatggagtacggaagatgccggttcgtaagcgtaaggaacatacttcagcaactggacggcagcgaagttaccgtcctgcgaaaccatgtagtccatccgcacaccgccgtccttcttcggcagtacctctgccttgccgtcaaaagtcttctcctccagcaaccgccccaatacagagaggtcgcccgcatcgaagaaacaagaaccttttttcaccaaactgccggtcggaacgtatatcagactcctttttcttatcatcaggcgaatacctccggccaccagaaaggcgattccgccgaccagcaggacaggacctgacgcggaagaggaatcttccactttcgacgagaaaaacagaaggcacagtcccaccgcacaaaaaaggagggaaagaataagagccgaaatattggtaatcttctttatatcgggatgcgctgcggaaaacagggtttcggcagcagaaatgttttgattcatacggattgaaaattttatttttgctgattgttcaataataagatatactcacgacgaacagccacaccccgcttttcagccaagtgtaaccgtcagtataaacgataaaaaaacaaaccgctaaatcagaatccgtctcatcccgaagatataatgctcgcaggcattatcccagttcgggctacgggaagagtcatgcacgagggtacaacaataggtcaggttgttcatgcggcaaatgagataccgctgtaaaattcggagaaaatgggccgtttccacagatatgtaccgaagatgcatcccctttaccgatgcgccggcacggcaagccacatcggggatttccccgattatgcctgttatgtcgctgtcctttttttgccggatagagtctctgtcatggaattgctgaaaagaggcgttgtccgtatttcggacacaacattcctgcgcagccgccacaccggccgccggaacatgcagcgccccggaattgcataccaaggccagcagcaccaacgatagaacagcaacgaatcctttcataccttaattttgccttgcaaaggtaagcataaaggcatttttttaccattcccgtgaaatgattaacaaaaataaacggaatcatctgtgttttccacccgcaggacttaatgcgggggcctctctggattcggccagtgccgccacgcactcttcgcgtatggacttgatgtaatccagtaccattaacggatcgacactttttccatcgagcttgcaggaaatatgcaggtgttcgccggtgctgcgtcctgtagaaccggtaataccgacgacatccctcggcccgatagcagcccctttccgggtaaggatacgcgacaggtggcaatagctgaccgtgtagtctccatgccgtaaggtcacatacttgccggaggatttgtcctgcccgactttcactaccactcccgccatcatggccatcacctcgtcgccccgtgcgtggaggtcgattccgttgtgaaacttcttttttccggtaaaaggatctttccgatacccataaagcgagttgattttcatccggtgcagcggatagcttacgctaaggtaacgctctatccatacgtgtttgcaggtgtcggcgggcaatgccggggcggcgtctcctgccgacggtaaggagtcttggacggaaagcatgtttccgggcaaggtcgccacattatccctaccggcagaaacgacttcaaccctgtatcgggacggcacggtcgagaccgtattgaattgtgcttgaacggggcctgcgatacttgcagcacccgccatcaaaaccagtagtttctttctcatgcggcaaatataaccagccctgcccaagatgtcccgtttccacggcctttttcgaccaaagtacaacaaaaaaagcattcagagtatgaatttatgcgcaaaatcatactctgaacataaaaataaactctcttaatacactaatattattctattatatacaagggaatgaaaagaatctatctttgcaaagtgtaattcaaaatacaaaattaaatatgaatgtagtacgatttgaactaattgaattgccctatccgacactggcccgattcgggcttacacaggagatgatcgaggacttgccgatgcgtgtcctcgatgagatttgcgacggcagacactctcccgtgcttccggtccgtgtccgtgacgagaagggagaactaatcgaaagccgcagccgcttcgcccttgtccgtagagatgacggtctgtcggacgtggtattttatcccgtcctggaatcctcgccactggaacgctacgacgaggcgcaacagaaacaactgctcgcaggcaaggcgattcttgccgatgtggagacggcagacggacggcacagcaaggcattcgtgcagatagacgaggaaacgaagcaggtgatgtatatccccacgccgattatcgggcgcaacctgcaagtgctggccgacataatgcacctcggtacaatggaggtaaacagtatgcagaacggcgaaccgctgacactggtcgtggacgatgaacccgtcacggtgggcatcgacctgcatgacaagaccggcatccgcttctgttcgggcgacagccagaaatggaaagaacagcccaaacgcgagtgggacaagtacactttcggcgtgtacggctgctgggtgatggacgatgacggcaacctcgactatgttcccgaagaggaatataccgaagaactgtggaacgaacagaagaaaagcgccgagcgtaaccgtgcggcgggagttcacaaataatatcttaacatccagcgaatatggcagaacaccaatattattccgaagaggtacttatcgagaagatggagcgcggcgaatacggctggctcgactatgtgaatcatttctcgcccgaatggcaggaggaatatgcccgctattgcaaggagcacagccttatggcgggcaacgaatccgccgccgagttcgtccactacaaggacgagcaactggaggcggcgatggagaacggagatgcataacggaaaccctttttaacaacggattatggcgatacgaaagaataccaacccccgaatgatggacctgcaacccgaaatgcaggacatattgaggcgtaacggtatgcaggcccacgtggtcagcgacggcacgggctaccggctcgtggtgcagggccacgattcgccgctgctgacctacgaccttaccgagcgtcagatgttggccctgacggactggggaacaaactcggccaacaagaaagcctacaacgtgttcacgagcattgtagggaaagacttttatatgcccaagaacttcgtccatgcccgcaatgccaacggccgtgtcgctatggggctgcacggctaccgtatcggtatcggcgaatacgggcatgtgggacggttgggtatgccgcccccgtttctcggctggacgccacgccaccagtggggcttccatctgcggcgggtcggcggccaactgttctatccgggaccgcccattgtccctgaacggtgggacggacgcatgaagccgggcgaattgcagtcgggcggctacggcttctattacaaatacaaggccggacaaccggtgcaaccggcacaacaggccgacgtcctgcaaaacctgcagacggtcatcacgccgctggtcagccgtccgcgcagcacggaaccggcccgtacctacaaggaactgataagctctcctgtctatttttccaacgagaaatggcaggaatgtcttgcctcccacggccttatcgtcgataaggaggcacggacactgaccgtacagtccgaaaaggtgaccgccgatctggtctatgacctgacggaagaagaaacggccgtcctgacctccaactccatcgaggaacaaccggtcgagaagcggctggaagtcctgaacggggttatcggggcggattttgccgacaaggtaacgatggcggacctcgacagcaaacaacgtatcgcccttggtctgcaccccgaagtacaggaggaactgacgcagcgtcagcaacaggagcaggaaatcctctccccactggaaaaccagctccggcaggagatgccgtatggtgcggctgcttccgtcgatggacgggatatttccgtccttgacgagcgcaagggctggtaccgagaagaacggcacggcagggaggtcgaggtcggcgagatagccgtacacccgtcccccatagagggcaagtacaagatgacggccgtcatcgacgggcaggtcatcagccacgagatcagccagaaggattacgacaaattccttgcggtcgatgactaccaccgcatgaaaatcttttcgaaaatattcagcgaggtggacatgaagatgcggccggaagcacagcgcagtctcggcgtgaagattttcgccgcccttgcggcaggaacggtcgtcacggcgggtgtcgtccacggcctgcggcatcatcatcacggtccggagttctacggtgagcgtttcggaggcgagccgcgtccgtatttcaagcccggtgtcgatacgccgagggacgtggctatacgcaatttcgaggcacagatgaatcaggatattaacgatatgagaagagggagataaagacaattatgagagaaggagaccttacctacgacgacttcctgcaaaggctgaacattcaggacgtgctgattgacgcgggctaccacctgaaccggcgcgacggcctgcgctatccctcgtatgtccgtctggacagcgagggacggcgtatccgtggcgacaagttcatcgtgacgcaacagggaaagtgctgcttccaagcacagcagcagaaagtctataacatcatctcgttcatcaaggcgcacccgcagtttttcgctgaataccgtgcgggcatgtctcccgaccgactggtgaacctcgtgtgcaaccggctgctgaaccatcccatcgaggaccggacaacgcggattatacagcccaagcgggacatccgcccgttcgacatcgcgaactacgacctgtacaagttcaacccgcaggaccgggagacacagaagaagttctatccttatttcaagagccggggtatcgacctctacacccagtacgccttccaccgccacttctgtctggcgacgaaacaccgtgaggacggtgcggcatacaccaatctcgcttttccgctgaccttgcccaaaggcgacggcacggtcgtgggcttcgaggaacggggacgtgcaagaatggacggaagcggcagctacaaaggcaaggccgagggcagcaattcgagcgaggggctgtggattgccagccctgcccaaaccccacttgcggaagctaagcgtatctattggttcgagagtgcctacgacgcgatggcttattaccagcttaaccagaaatgggacaaggaactgcgaaagggagtgttcgtttctaccggcggggcaccgagccaacagcagttcaaagccatgataaaggccactccacgcgcttaccaccatctctgcttcgaccaggaccgtgccggacagatcttcgccatcaacttcgcgctcacccaggcgggcaagacattcaccagcaacgtgacgaaagacgacaaactgctggtccgtatcagtggcgaggagaaccagaactacgaaataaaactcgaacccttcgactttcacaggataatcggcacgcttttacgtcccaaagaaatctatcgggaagatggtacgctcgactatcggacaatcggcgacggatatttgcaggagatgagcatggtgtgccaagacgagtacgagatagcccttgccgagggttcggccagtgaggaaacactggagggcatgagacaaaatatcatggccatagaggatgcgatccgtaatcttcccgctcccggcgaggacagcaccgaccttattgtgtacgagcccgctgaaaaaggctataaggactggaacgaacagctcttggcaaagatcaggctgcaagaatcagttcacgaagagccggccagaagagaagaacccgaacaggaacggcaagcacgtttccaccgatgacaacgcagtaccccctacatgaaacaacaaaagaaaagagaagacaatgaatgacaagaaattgacacataatgattttttgcaaagactcgatatccgggatgtactgcttgatgccgggtatcgccagaaccgacgcttcggactacgcctctcctcgtttatccgcacggacagtgaggaaaagcgtatccggggtgacaagttcgtcataacgcaacagggaaaatgctgttgccaaccaccccggcagaaggaatacaacgtcgtttcgttcatcaaggagcacccggcgttattcgcggaatattatgagggaatagacctgaaccggctggtaaacctcgtgtgcagccgcctgctgaacatccccttcgaagaatacgaggtgcaaaccgtaccggtcaagcaagacctacgaccattcgatataacagactacgacctgcacagattcaaccctcaagaccatgagatgcaggagatattctatccctatttcaagaaccggggtatcgacctcagcacgcagaatgctttccaccgtcatttctgcctggcaacaaaacacggcgcagacggtgcggcatacacctgtctcgcttttccactgaccttgcccaaagagggcggtacggtcgtgggtttcgaggaacgggaacgtatgagaatggacggatgcgatagctataaaggcaagagcgaggaaagcaatgagagcgaagggttgtggattgcaagtcctgccggaacacctcttgccgaggccaaacatatctactggttcgggagtacctatgacgcgatggcctattaccaactccatcaggcgaagaacaaggatttgagaaaggcggtctttatctcaacgggcggcaagcctatcgggaaacagatgagagagatacttgatcttaccatccctgcccggcaacatatctgtttcgataatacccggaaagggtcgaatctcacatgggatttgcaaaaggagatatgccgctcagtacgttttgccatagaggaaacgccggagaggaaaccctatctcgattccataccggacggcggggatttgacagacggagaattttacctattgcccaagggtggtttgcaagaaatctgcatacggttcgacgccgaatcggaagaagcggagtcgatgcgttcgagcgggttgtgtgccccggaagacgtgcaggaccagatagataccacgaacaagtgctaccgggaatatcgagagaaactacgggagttccttggtattgacagggagcatgatgtctccattacctgggaaagtccggattatcgccatacgagctggaacgaacagcttttggctgaacagaaacgtgaagagactgtcgggcaggagtcggaaaaagaagaaaacgccgggcaggaacgacagatacactttcgccgatgaccatgccatataccatacaagatgtccggaacattatcctgcgcccgcacgccgggcaattcgtcatcgacgaactgccattgatattcatgtgcatggcgggactggtgtacggcggcatggaaggtatgccgcttggcggtatggcgacggtcattgccttgtttctgttcctcgtgctgctgtatcgtttcatttgcctgcgccggatatgttaccgggtcggcaacgaacagcttgtctgcgagcggggacttttctgccgcagggtggactacatggaactgtaccgtatcgtggactttcaggaacaccagagcctcctgcaacagctttgcggtctgaaaacggtcgttatcctttcgacggaccggaacagcccgaagctcgaccttatcggtatccggcgcggaaacgacatcgtggcgattatccgtgaacgtgtggaaatcaataaacgaaaaaagggaatctatgagattacgaatcattagcatatgggtggtctttgtgcttgccggtctgcttccgcaattggccaaggcgcaggttgccgcttcgaacccgttggaatgggcagccttggccgagggaaacgaactgataaacggccagatagacaaacaaatcaaggggcagacacagaccgccctgatgcagaacagtatcgcagcggagttcaaccgcatacatgagtgggaaaagcagtacaacagttacctcaagacggcgaacggttatgcttcgtcgctgaaagcctgtacccacctctataacgacggcgtgcggattttcctcacgctgggaaaactgggcaaagccatcggggacaacccgcagggcatcgtcgccagcatgaacatgaacaacctctatatcgagacggcgacggagctggtttccgtgttcacgttgctgaacgacgccgtggccaaaggcggcacggaaaacatgctcacgggggcggaacggagcaaaaccctgtgggctttgaacgaccagctcgcggcattcagccggaaactgcatctgctctatttgagcctgcgctattataccctgaacgacgtgtggaacaacataacggcgggtatgatagaccgcagcaacggcgaggtggcccgtctggccatgtcccgctggcgcagggcggcagccatcgcccgttgaaaaaaggataataaaaaacgaagaacgatgaagcggataatctcgatatggattctgttgctgtgcgccggtatctcgaaggtacaggcgcagaacgatgcgacccttgcgggaatgattctggtttataccaacaaggccgagaaggaactgaaaaaccaagagaaggtcatgctgatgcaaactacagggcatgtgtggacgaaggaagaagtggaaggcacgacggacttgcaacgggagttcaacaattacctgaactcgttccgctcgattgtctgctatgcggctcagatttacggtttttaccatgaaatatcgcagcttacagacaacatgggcgacttcaccaaacaattgagcagacattcgacgggtgcattggccgtcgccctctccacgcggcgcaaccagatttaccgggagatgatattgaacagcgtggaaatcgtgaacgatatacgcacggcctgcctctcggacaacaagatgacggaaagggaacgtatggagatcgtgttcggcatacgtccgaaactccggtcgatgaaccggacgctgcagcgactgaccaaggcagtgaaatacaccacgatgggcgacatctggcgggaaatcgacgagggcgcacgccctgtcgcggacaagtacgacatcgtgaaagccgcccaaagacgctggcggcaaattggaagaaatgtaagaccctaaaaaaaagaataaaaatatgggagcttgggatacgatattgaaatacggcggaaaggccatgaaaggcatgggcaaggccgccaatgcgacggggaaaagtgccggtcatgcggtactgcatccctcgcagacccttcggggagccgggcaggcggtcaaaacggctaccgccggagctgccgtcggttatgtgggttgggaaaaactgaccaccgacaaaagtgtcgcacggatcgtcagtgaggccgtagtcggcaaatccgccacggatgcccttgcaggtacgaccgaagacatgaaggaactgaaagacaaagccggagagacggtctctgccataggtgaggctgtgggaggcgcggactcgaaactgaacggggtatcgaacttcctgcgggaagcctccggcggtgggttgttcaacatgctcagcggctttttgcgaaacctcggagggggcaatgtgtcgggattgaacattgcaggacttatcgcagcagcgtacctcgtgttcggacgtttcggctggctgggtaaaatcgccggtctgtttctgggcatgatgcttatcggcaacaatgcgggcgttgtccgcacggttccctcggaaacggtatcgaggacacagacgccgacactctctccggaggaacaaacgcaaagcggaggaatgagaagatagaaacacgaaaatatatatcacaatgaaatatacggaagaaatgattctgcactccgacagcggctattgtatgccgttcgaggagccgcaggggaaagatgtggagatgtcgctcggctacggcgaacaggtacacccggcaacgggagaaaagttctttcatcacggaatagacttcaacgtgaggtgttacatgctgtcagccgtggccagcggcatcgtgtcaggtgtgggcaacgacccggtacatggcatttgccagacggtccgttacggcgggtacgaggtgacatacggtcatctgtcgaatgtattcgcccaattcggacagcgggtgaaagccggacaaacggtggctttgagcggcgaactgctgcatatagaagtcaaattcaagggcgaggaactgaacccaatagagttcctgaccatgttgtacggcaacatcaaggctttgcaggaagccgacggcaatggtgcggcgtctttttacgatgcggaaacaagagtaaaaaacgactacgagaaggatcaaagggaaatagaagagctgatgctccgctttctgccactttacatggaggatttacagcggggagcgtacacggtgcccgcacatacggagcagtcgctgcgccacatctttacaatgggagctgcgaaggagtatttctatgagaagatgccgagcatgtacaacccgctgggactggggcgcaaagccatgccgctggcctgcaaggtacagaacctgctgatagcggatttcctgaactaccttgccctgcggcatgatgtgtacctttccgcaacaggcggcgaggtaaaaaaaaacttcatgacgaagccgtagcgggcagcggactcattgatccgttggcggaactggacatcgacatccagagcttcgacataccgagaatcgtctccgtctatcccgaccgtgccggagtccgctggtggacgaaggcatggttcaacaaccgggaggaaggggaagcctcggtagaaatcgagcgggaacaggcgatacgtttcattcacgacaatatcgaaaaggacacgtggctcgaagagtttttccccaagcaaatggaggtgtaccataacgctatcgagcagacgaaggaacaactgttgaaacaaataaacatgatatagaaagacattgattatatggacggaatcaaacatagcagaaggtttgcggagttggaggccctgatgagcagttatttccgccatcatcttgtccccgtcatgacgcagacgcaatcctacctgaccgaaaaacagggcgaggaaatgaaagcgtattcgacctccctgggcggcatactcggcatgatggcgtcagcggggcaaccgctcgccgacccgtaccagactctcaaggttacgggagagtggaactccaagacgaccgaggactacatcgggatgtgcaaggacaggattctctcgtcggaggagatgcagcacgacctcgcctacatggccggacagtggcgcgatgtcgttgtgaaggaagtcggacgcgagcgttacgataaactgtcgcaggaattgggctgcgacctcgcctatgccttcgtggactatcgtgtagagcaactgatgatagaccaactggtcaaggaacgtatgcccaaatcctcggcggactacatcatccgtaaggcggcagaatcgagcctgctgggattgccacaggctttggggcgctcgccgctggccgaagagatagaaaaacgcggagaggttgcctaccggccgagcaagttggagaaaggtgcgggctgggtgttgggggcttcggccgatacggtcatgttgggcggtacgggttcgtggacggccgttgcacggttcatcggtgcggatacggcaatctcagccgttgccgaccatttcgggaaggaggaaacgcagccgctctctgcagaggagtgtatcagcaagggcgtgttcggcagcgacagcaacgtgttcgacagcttccgcaaagaggcggcaagcataccgggcaaagaaaacacggctcttgccgcagccaacggaaagttgcaaaagaagataccgattgtaacattcgattttatggactggtggaaaacagacaatagaaatatgccgtggcgggaagaaaccgccgaggaggaacggaaacgggtggaacggtataaagacgtgccgatggttgtcgctcccggacaagaggaagcctacctgcaagatatggaaagacggaaagccgaaacggaggaacagacggaatcgaaacccaaacaaagggaaaaagaggaaaaggaagtgtcgacttccgccgtctctgcgggggaagggatgcggcaggaacaggcaggtcagggaacacagaccatacagaccaacgagaacggctgggacgagctggtccgctcgctcggactggacggcataggcgatgtcgcgggtaatctgggctatatactggccatgctgcccgacatcctgctgggcgtgtttacaggtaggacacaatcgctgggcctgaaagacaacctgctgccgatagcgagtatagtggcaggtatgttcgtcaagaatccgatgttgaagatgctgcttatcggcttgggtggcgcgaacctgctgaacaaggcgggacacgaggtgctgggaaaagaacggacggagggaaacagaaatgcagccacgaccggtagagaggtacagtacagacgctatcccgacgagccgctgaatccgcgtatcgtgaacccggcactacaaggctgcacgctggttgccacgatagaccgtgtgccctgtacggtgcagctcacccccgctatggccgacgcttaccgtgcaggagccttgccgctgaacacgctggccaatgccgtgctcgcccaaagcgacaagctccgccagatggcttcgcagaactatgacaacggacagcaggaaaccatcgtgcggacacggggcattcaataatcctgtaaccgataaaaatatgggaatatgaaagaaaaatcgcaaatagaaaagaatgccgaggagcgtcagatagagctgctctccacggctttgaacgaagcgtcgaatgccgggggacactggctcaacgctacgggcaagggctttccgaaattttatccgaaaggtgttgccgtcagcccgttcaacggcctgttcatggccttgcattcggaccggaacgggtgcaagaccaacctgttcaccctttacagcgatgccaaggcacgcggcacatcggtacgcgagcacgagcaaggcgttccgttcctgttctacaactggaacaagtacgtccaccgcaacaatccggaggacatcatcagccgggacgcttatctgaaactggacgaggaggtgcagaaacagtacaagggcatacataacagggagatccgcacacttttcaacatcgaccagacgacactgccctacgtggataaggagacttacgatgcggtattgcagaaagacggtagtgccgtggagcgtggctactccgaaaccgatgaacggagactgcatatccgcttcaacgacttcctgctgaaaatgcgggacaatctcgtgcccgtgcgttcggacggcagcggaatgccccattacgagacggaccgcgatgcggtctatatgccgcgccaacggaacttcgagcattataacgactacgttcaggaagccttgcggcaaatcgtgagcgccacggggcaccaacaacggctggcccgtgaaggcatggtgatgaaaaacggcatgggtccttcggaagatgccctcaaacaggaacggctgatcgtggaggtggcttcgggcatcaaaatgctggaactgggactgcctgcccgtctgtccgacaaaagccttgaattggtagactactggaaccgggaacttaaagagaaccccaacctgatggatgccctcgaaagcgacgtgaacaacgccctcgaagtaatccacaaggcggaacggggcgagaaaatcgaatatgccacgatgcgtaaccgccggcagacttcggatatgcaggagcagttacccaagcatttctacgtggccgatgaaatccggaaacacccgaacaaggaggacaagaccattgtcatcgtcatcgatccgtcctcgaaatcggcggatgtgatactccctgccggtgcgtcgccggaggtggacaacgaagtgccgggcatgaacaaggcccgtatcggcagggctttgcgaagggaaggtattgaaaacgtgcgtttcttcaatcccgacggcgcatgggggtacaggcccgatgatgcctatttcgccaagaaacaggtatcactggcccgactgaagaactgggcactggagatgctttccacactggacgtgacgcctgcggtcaaacgggcggacgaaatcggtttcgaccagatacagatgatccaggacgacaagaaccgctgggcgctgtatctgaagcccgaacatcagaacgggtacagtatctatccagacaaggaggacgtgaaccgttttttctccacgctcaaacaggcgatggacaacatcgacaaggtacgcatggaactggcgcacaagtattatgtactggcggaaacacagccagacctgaaagtggacctgttcagcagcggggcgcaggacatcgacctgaaccggattcagcgtgtgtccgtattcaagaccaaacaagaaggaactctgtgcgtggcgaccatcgacgggaagaaactgcagccccggagcgtcacgcggcaacagtggcagcgcatgtggctggccgaggaccgtgcagaatataaacgccatctggcggccacgctttttgccgatgtgctgcgtaaaggacagacgcaggaagagactgccggaaagaaacaaggagaagaggataccctacagcaggataaggacaagcaccccaagcaagccaatgaggaatcccccaaaactgcttcatccttgaaagagttgcccataaaagatataccggaacaactgtatgacaaatacaagaaaatcaaagaggaacaaccggaagcggtcgtccttttcaaacatgagaacaagtattacgcttccatgtatgatgcggagaccatagcgaacgagctggacatgcctccggccaaagaacgcattccgtatgatgcggacaaaatcatattggtatttgaacacagcaatgaggaaacaaggcagcaaatccatgcgctgcgggcatacgtgatggattgtgacggtatgtccaaggcgcagcaaaacgagcctgcagaggcaactgacgaacagaacgagaacgaacaacgtccaaccatgaggaggtaaagatatggcaaacaagaatcaagaatatacggaacaatacgcagattatgcgatggcacagatgcggaggtacggcattccggcctccgtgacgctggcacagggcatactggaaagttccaacgggcagagccgtttggccgtgaatgagaacaaccatttcggcatcaaggccacgcccgaatggattgccgaaggtggccggtacggtctgtattccgatgacaagccgaacgagaagttttgcagctacgacagcgtgggcgattcgtatgagcaccactcacgcttcctgaaagagaacagccgctatgcccgctgtttctcgctctcgcccgatgactacaagggctggacacagggcctcgaaaaggcgggctatgccacgggcgggcattatgccgacagcctgcaacgtatcatcgaacagaacgggctgcaaaagtacgaccggcaggtcatgcaggaaatggagacgcagggaaagcggttcggcgtggaagagaacccgctccgtgaggtcggaaatacagtggactattcgtttccggtggagcggaaagagtttcttttcgtcacctcgccattcggtatgcggcaagatccggcagacggcaaggaacgtatgcacacgggtatcgacatccggtgcgacggcgatacggtcctggccacggaaaaagacggcaaggtcgtcgctgtcaaagacaaaggccatgcacccggtaacaaatcgctgaccgtggaatacacccgtccggacggcagcaaggtacagtgtacctacatgcacctcggcgaagtttccgtaaaggcaggcgatacggtacaggcaggccagaagctcggccgttccggtaacacggggacacggacgaccggggagcacctgcacttcggtgtccggcagatttatgcggacggcacgcagcgggacgtcgatccggcagcgtatctggctgaaatcgcacaaaagggccacatcaaacagcaggtactacataacggcaacgacctgctcgcccgatataagggaacagaagagaatgccaccggcaaaagcctttcgcccgatgcgtggatgaaaaaactgctctcctcggaggatagcggcgtgggattgtcggggtgcagtgatcctgtcgtggaaatggccatgaccgcctttacctccctgatgttactggcgacgcaaatcgacagcaagaacaaggaggaacaaaaggcagccatttccgaggcgatggacagccggcgtatcgacctcaaagcgttgctgccgggcatgaaaacctgtgacctcacagtcggggaaaacgggcgagctgtcctgcaggcggacaacggcagcgttcaggtatcacgggaactggcctctgccgagttaagccgcctgtcggtgacgctgaacgacagttctctttcggaggaagccaaacggctgcgtgtgaccggcgtgctgaacacggtcatcctctcggaggcggcgtcgcagaactttgaacggggaatgtccgaacaacgggcacaatcggaaaacctgaaaagataatcccaaaaagtcatgataaaacgcgtgatgatacgactttgcgggtacttgtccggggtgtccgtctgcgccctgcatatcctgttctgttcccggctattcggttgggtagcaacactcgttatcgtgggcgtccaactgggtattgccggctggattgtctacatgagaatacgtgctcccgattaggaaacgctttcaacctgttcaacttcaagacaccccgctttgtccggtggactatgtatcactaaaagacaaaataaaatgattaaatgcaatattacggcgtgcggcaccatcggccgcgacgcttcgatgcgcacgaccaaagaagagaaaacattcctgacctttccgctccgcgtcgtgctccaaggcaaggacggtcggaacgaaacggtcgagatcagtgtcagcaaggagggcggtcagaagaaggtatccggctatcgaaacggattgcgtgtcgaggttgcggggacgctgttcctgaaacgccggggcgaaaagctctatttcaacctctttgccgaccgtatcggcccggcggcggacatcgcggattccatcaagggcgaactgtcgttccggggcaaggtgggcaagaacatcgaggaacggaaggacaaaaaggataagtcctacacgatgttctctgcattcagcaccgaaaaggtcgatgagaatttcgagtaccaatgggtgcgtttcttctgcttcgacaggcaacgtgaagagtggctgcaaccgggcgtcaaggtagaagccaagggcgaaatgacggtctcggtacataacgggaagccggacatctcctgccgggtggaagaactggcgcaatatattcccgaatcggataacttcaatcagtagcagtcatggccggttatagaaagcgaaatacggaggggccgagcagcgaggacaaggcgctggacctctttgccgagatgatgattttatgttgaactcaacataagatcattaatgttacccatttatttatgtcagtttctttcatatttacttgataattagagttcttgtcgagttttgcacaacataattatagatgctcgttatattatattgtattactcacataattataagagcatgttagaacaaattattatccgcaagccattccttaaaaaacatttggctgcaccattattaaaggagcgagaatcctttctgactatgaaaagtaaggaagggttgtcccggctaacactattgggttgggctgggtattcgctcaagtttatccaatatttcgatcttcatgatggaaaaaagagaattgtatctcttgatgatgtcgttgaagcagcacgtctatggtcttcacccatttctggtcattatcattctcggaaacatcatgattgcccttcctcgcgaatcaaatttattgagatggcggttgatttcttacaatacgtaggccttttagattttcgttatcaagatgaaatggtcaattatctcgcagaacgcaaatggcacaaagtcagactgattgctgctcccttttataatgagagaatgtctttcttgatggattgcaaatcaaaaggttttaaaagaaagacacttcagctttatgcacagtaccaacttcatctaatagagtatcttaatttagagaacttccgtactgttaccaatgaggaaatctcaaatgcagcaaaaaaatggcaaaacctggaagacaaaggttctcacaagaaaaaaggtaccaagtctaattacagtttcttcacctattttgcaaatatgtggcttaaagagctacatatgctaccagaatcagaatctccttcaatatcaggaatgcgcataaatgaataccttaatcacttagcatacaggagatattctcatgcctatatcaagggaaggaaagatatactcacttatttttacaagataatagaaaaggagaaccaggcataccctttaacaatggaagatatagataaatacattgaatactacacggttaacaaggttcaacgtaatacactgaaagagtacctgtgttgtgtccgtgtatatctacgttatgcagtcgaaaaggggtggtgtgttgccgacctagacaaagctttaatcactcccaaagtatacagtgaagaaaatctcccttctttcttgccgtgggataaagttcaaaaactgttacaaaccgtaaaagaacaaacaggtaaatccgcatcgcgcgactatgctatttttatgttacttgcgatgtacggtttacgttgtagtgaggttgcgaacttgaaggttagcgacatcaattggcgtaaagaacaaatttatattaagcatgcaaagaattgtcgaccacaagtattaccacttctacataatgtaggagaagctattatcgcttacctaaaacagggaaggccaaatgacataggaagcgacaacttgttcttttgtacaccagccccaatacgtcctatatcttgtacagccatagcttccgtcgtatataggtatttgaaatccagtgaaatggaagttaggcacaagggaccccattgtttacgccacagccatgcaactttcttgataaacaaaggacaaaccttaaaggaagtcggtgatttactaggtcacaaaagtatggaagcgacaagagtatatgcaaaagtggatctcaattcacttagagatgtttcaaatataaactggggggagtttctatgagtataaaagaaaccgttgagtcatttatcaagtttcgtacgtctattggtcgcaaggatcagagtacaacctactctttgagactatttgctaagttcattggagaaacaacagaattaacttcaataacggaaagtgatagtaatgccttcctttacagaaaaggaaatgtcatcaccagatattggcattctcagcactgcattctgaagaaacttttcgagtgggctttttccagaggactcattcaaaacatacctattcccgtttttctacctaaagctccagagtattatcccgcttacatatatacggatgacgaactgaagagactatttgattgtgcgcttacatatcgcaaatatagaccacttgttaatgagccaatatgtatacgatatatcttgatgatcacgtatgtgcttggactcagaataagtgagaccttatccttaaaaattgaggatattgatatggataatatgtacgtgcatatacattgtagtaagttctacaagtcacgcttggtaactttcaacgaacaagtctcaagattgatacaagatatattacaatggcgaaggactcaaatgtacccaatggaagaggagtcatacgttttcataaatctgaaaggaaaaccagttaatttggtatctctacatcagatatttgcaaccattcgtaagaatgcaggtctttatttccctgatagaggacgccatcagcctagaatccatgatcttcgccatacttttgcggtcaacgtccttactaactggtataaatcaggaaagaacgtacaggatttactgccgaagttgtctacctatttggggcatcttaacgtgtccttcacttccgtctatctaacaaagacgccaactttattgcaggaagcaaacaaattgttttatgcttataaaaacacgaataatgaaaaatagaaaaattgctgaaacagaacatcttggctattggctaagaccattcctcgtagagtacttaattgtcactcgcaaccttagtcgtaacactcagatgagttatcgtgatacattccgcatgttggtatcgtatgtctcgacattaacaagtattgcaatagataatctcaaaatctcggatattacgactgacgttattacaaaatttcttgattatctggaatttgagagaaaaattaccgtttcttcaagaaataatcgtttagctgcaataaaggctttcgcaaagtttctggcgtggaaatctcctgaacatatagattggtgtcacaatgtcaatcttatcccttcaaagaaaacagaaaaacgcatgataacctatatggacaaatctgaaatcgaagccttggctgctgcaccattgaaaacatgtaaatatcaagggataagaaatcgggatcatgtcattatcttattcatgtataatactggcgcccgagtgtctgaagttattggtgttaaagtgaaggatgttgcgatgccttcaaaacgtggaatgccaatggtgacattacatggcaaggggcgtaaagagagaaattgtcctctatgggaggatttctgggatttactcaagccatttatagacaacaagttgcctgacgattacctttttcttaaccgattcaatcagcctatgagtcgattctgtatttatgaaatgataaagaaatactcacaagatgtaatcttaaatcatccatctcttgctaaaaaacgcccatctcctcatgttatacgccatacaaccgccactcatctacttaattctggaacggatattgatatggttagaaattggatgggacatagctcgattgatacaactaacatctacgccgaaattagcatggagaggaaattagaagctctcaaaaaatgtgagcagtccgtttctgatgcaccatcacgaaaatggtcagaggataaggagttaatgaccttcttagatagtctctaatccctccaaagatagaattatgttgtgcaaaatgtcaaagaacgattgattattaattgtttagactaatgcccaacataattctatgtcagacattaatgatcgagaaaatcgaaagcatccacaaggactggcataagccgtggtttaccgagggggcactgcaatggccgcgtaacctttccgggcgggagtacaacggtatgaacgcccttatgttactgttgcattgtgagaatgaggggtacaagattccgcgcttctgcacctttgactgcgtgcagcggctcaacaagcccggcaaggacgggcaggaattaccccgtgtatctgtactgcgcggcgagaaatcgtttcccgtcatgctgaccacattcacctgcatacataaggaaacaaaggagaaaatcaagtacgacgactacaagaaactctccgacgaagagaaggcgcaatacaatgtctatccgaaaatgcaggtgttccgggtgttcaatgtcgcccagaccaacctgcaggaggctcgaccggagttatgggagcagttggaaagagagaacgggaaaagggtcgaaaacggcgaacatttcagttttgggcctgtcgatgcgatgataaaggacaacctttggatttgtcccatcaaaccgacgcaccaaaacgaagcatactactcaatcacaaagaacgagattgtcgtacccgaaaaggagcagttcagagacggggaatctttctacggaacgctgttccatgagatggtccattccacgggtgccgaaggtgtgcttgaccgactccaacctacctctttcggttcgaaagagtatgcccgcgaggaactggtggccgaactgggcagcgcgttggtcgcacaacgctacggcatgaccaagcatataaaggaagacagttgcgcatacctcaaagggtggctcgatgagttgaaagaatccccacagtttatcaagacaacgcttctggacgtgaaaagagcttcgtcaatcgttactcaaaaggtggataagattgcgcaggagttggaacaaaatgttaccgaagagcaagaggacaaacgctctgccaaggaacgtattttttatgcttcggtggcctatctccaaaccgctgacgacacgaagcaactggacgaattgaaggacaaaggcgactacaagggtctgcttgcgctcgccaaggagtattacgacggcaacggcatggacgagcagcatacatacgcttctcccctccagaaccggggcgatgacctgctgattgaagataaggactttgccgtggtgtacaacggaagtgtcggaggcacatacgacatcatgctgaaatacacggaacaggaggtgcgggaccatatcacacgttacggcacagaccgtgccagcgatgatgtgaaagaggtggccaaagatatggcggcggaacagtttgctgaactgacacatcagagaatgccggtattcgaaatgccaaacggagatattctgtatgcaaggtacaacagggacaaggatacgctggacgtgggtacggccaccaatgcagggatggccgtacaacatcattacccttatgaccacaacatgacgctggaggccaacctgcaagccgtgaacgagaagctgaacgagcttgaagaatacagggaggagctacaagaggcggaatatggcggcggtctgcgtcggtaacggcagcgtaatatgaagaatgtggagcgatttcatactgaaggcgctccacatccttatagtccctaccggttttcattccgctacagactatatgttatcattacgacagcagtttgtcaatcattgactgtaactgcagcatatcgcaatattgattgtttccgccggtataatcctttgcgtgccgggcagtccgtatcatgaacgaaccgagttctatctttatcccatcatccatccgcacatccgcagaatggtttatgtatacaaacttaccattacgttcaataaagcaacttgtataataatgccccttattctcggatacgaccgccgcatccacggcttctgcatatttggatatttcacgtagcaatgccgtttggaaattactgtaccttaattccgcaacactattacaaatataactttttaagtacctgagcaacaaaaagttgctcaggaatttgccatgtcagatttttcacctatcttagtgttgcaaatcaaaatatgtatcaaacccgacagacatggcaaaggtagcaattaaatccgagaaactcactccttttggaggaatattttcaataatggagcaatttgactccagactctcatctgtaatcgactcaaccctcggtatgagatgcaggctgtatggttatcaatacagcgaaatcatccgttcgcttatgagcgtttatttttgtggcggctcatgcatcgaggatgtcaccactcatctgatgtaccacctttcgcttcatccgacacttcgcacatgcagtgccgacacgattcttagagccataaaggaactgacccaggataacatttcctacacatccgacactggcaagacctacgacttcaacacggcagacaagctgaatacactgctcctcaattgcctattgtccacagggcagctgaaagagggcgaggggtatgacgttgacttcgaccaccagttcatagaggctgagaagtttgatgcgaagcctacatacaagaagttccttggttatcgccctggcgtggcggttattggcaacttgattgtcggcattgagaacagcgacggcaacacaaatgtccgtttccaccagaaggacacgctgaagaggttctttgaaaggtttgaacaaaacaagcttattatcaaccgtttcagagctgattgcggctcgtgttctgaagagatagtggaagagattgctaaacactgcaagaccttctatatccgtgctaaccgatgcagttcgctctacaatgacatctttgccctcagaggttggaagaaagtggaattgggcggcattgagtttgagctggcctccattctcatcgagaaatggaaagggaaggcataccgtcttgtgattcaaagacagaagcggatagacggcgaactcgacctgtgggaaggagaatacacctaccgctgcatccttacaaatgactacgagtcttccgagaaagagattgtcgaattctataacctccgtggagggaaggaacgcatcttcgatgatatgaataacggattcggctggaacaggcttccaaaatcctttatgggagaaaacacggtgtttcttctgcttatggcactcatacgcaacttctataaattcatcatggcgaggcttgacgtgaagaggttcggactcaaagcaacaagccgcatcaagacgtttgtctttaagttcatctctgtgccagccaaatgggtcaggacatcaaggaagtatgtgctgaatatctattcatgcaacaatgcttatgccaatgtgttccagaatgactttggataacaccgacaacttatagtcgtgattttgcgtattgcctcaagtcgcatggtggggtaaggggcatttatatgtctttatggtgacattcgatgcactgtgccccctttttactaacgatgcagattcttttcgcttctgtatcatattaggcgcgtagttgcggatttgaggctgtattcctttgaaacataagtttctgcgtctgcaaggacagaagattgccattgggtataaaaagtctgtgtcatattctttcaattctaattctgtaaataaattaggcacatagcaataaaagtattgaatttatagtattcaattaacatttaagcaattaccatgatgttttcagagaccaaaattacggagatttattgtatgacagatgatttttgcaaagaaattgctcaatttcaggaaaaatatatggttgaagataaagatattgaatattccatgccccacttcctttaatataactttatttccaactccctttctaccataacagcatactgtttttgaaagaagcccgccattgatgtatgtttttcaaagacgggcaactggctatattttgaattatactcacgttaaatagctttcccaattctctttgtcgatagttaatttgttcatttcccaatcgtattccacttccggtatatcggaataagggaagtgcacggtatagcctatctgtccgtaggagcaatgcagcggtacaacgcaaatttcctgaccgcaataagactgtggcgtacagtatttcttccaatcaaaacggcctgcaactatattgcagcagagcagttttagagccattatgcctttccaactctgaaaatctttcttgtaacttgctcttttcataatgaataccatttaatgagccatgttgtagtaaatttcgggttcgctcgatacgttgtaaatctgactcccgcaacgtaccaatagggcgttttttccgtagtaaagctgcttcatgccggttatgttccccgtgcggtgaaagtttgggaaacggcttattcctgccttttcggcgtctcgtgtgtagagggttttcgttctcattgcatggttgtttttaatgtttcataaagtttttctatcatggcttccgcctgctccatatcgctcacgatgtctttgattcggtaaggtgcgccgttcttgccatgcccgtccgtaccaatccacaggtaggcttcatagtcggggtcgaagtcttcgtaatatgtttcaacttcctgtaacaagctgtcggtgtcattgcctttcatctcaaccgagaaactgaaatcctgcccgtgaggtgtgtattgctgaaaatcgaacaccacgaggttcggtttgtcggtatcggttttaacttgccagcctaattgttcagctatggcgataatctgttctattgctgtcattgttctgtttttttatttcccttttcttgaagccttccgacttcgcccaaagggttgatttttacgtgcaattcccaacggcgaaagcaagaacagcaggcaaggaacggaggttaaaattttatgaaatgccgcaatctgcgattgcggaaagtttgcgtcaaattttatccggagtagcgaagcggtacttgacacgctgttcgttcgccgtacctttgctgcgtaaaaacaggccgtggcgatagtggagattccatgaaatgatacgcccaagcatacaaagggaatggaggcaaagatctccggccgttacaacaggaaacgacggcagtatgtgtctggggtataaagggcaaaaaaaacgtcgaacgattgtccatcggacaaaatgtaagggaatggaaaaagaattgtctgtataacagaatgttcgacatggcctttatcgggaatatgaacaaccacctgtcccgattggcaggtggttgcccgatataacttccgcagccggtatcaggcggccatgcgctttcggataagggcgatgttcttatgcacgaggttcataatccgcttgtgatatttcgtatttttattacacagtcctctcgactgcagcaccttgaatgtttcgaggctcaattctacggtctcgaccctcttgtcctctatccgtgcggagaataccagcgtatccggtttgaggtaatattcgcactgtcccacgcagtggtgcaacgcattaccctcgtcgtagtaggcttccacgctatccagtacacggacgactatcgttccgtccgtgaactccagaccgaagaacttgcctttcaactccctaaaacgtgcctcgttttccctcgcccgtttcatctgctccttgcgtttttcctgctcttggagaatacgcaccttgttctgatacttgtcatgctcggctttcaaatcggcggggcaaacatagtgggcgttgtgcaagtccttgccgcatctgtcgagcatacggagataatccacccatattccaatgtccgttatccgatacttctggcgtaacacgattttgtaggacggccaacagaaatccaaatcctgcgggtggtcgatgaagtgcttgaggtctcgtttgcgtccacttttaagtattgtctccactcggctgtccgatagcagggctttcatcagcttttgcggggcgatgtcggcaaacgaccctttcagcccgttgcgccgtaacttcgggataaccgtgtagcccggacagacataacagtcggctatgcgttggtacacgtaattgtcgttccgcagttccaatcccgacccgtacagaaagctgtccaaataacaccccattgtccgttgcaaggctgtcaaagcggttttcccgttctcgtccaaccagtatctcgccacttcgcacacgtctgtccatgcgttcttgcctttgcggtaacagacattcattctgaaaatccgctgcacctgaaatccgtcctgcgtggtgatgacagaaaaatagcttttctcatctgtcttgcggcaaagcgtgtctttgagcgtcagtttggcgtggcagttcgggcaatggcaacgcttcgcctttgtctcgttccacctatgaccgcaatcgaggcaggtcgtttgtccgctcggtgtacgaaaagcgtaatgtccgacggtatgccggaacgcccattctgcctgtttctccgtgataggcagcaaccgcccgttggcggctactacctgatgctgaaattttgtccgtgctttcatggtcagaaatcgaagagtgagagttccgtttgggtattctgtacagctttggcggtcggcttcggcctgctgtggcgttgctgtatcttgcgcatttcttcctcctgataggctttcagcgcgtcttttcgggcttgcgccttttcttcttcggtcagctccaccttgtgattgaccacgacgccacaactgataggtttgcccacgtcgatgttgtcctcatcatagtaatgaatggcgagcgaccacacctcgtcgtcggtcattccgcaacagccgcttgccttgacttgattgagaatgaatgtgatacaatcgtccaagtttttgttttctttggcataggagacggcgaaaagttcgtccgtccgtgccttgccgtccaagtattccttgatagtccgtttgaaatgttccgtacctttcatcgttcagcgttttgaggttaaaaatgatagtcgatgacaccgccgatgtaaagcagcgtaccgggtttaaattcacatgcctgccgcaggaactcgtaggattgctcggcgttggattgcagcccctcctcgtccatgtagaaccagtaagcggtatcgagcgggtttttcaggaacttttcgagttgatagaccgggccaatccagtcctgcacgctttcgggggtaagggcttccgccctgcttcgaatgtctgcgatgaaatcttctctccatcgttccgcaccgcctttgtagcgtatggtatcgtcggaaacaagctcgaacatgcctttgggcagaatgttgtttaccaagttgtcgatatggaactggcgttcctcatcgtcaatctccgcacaatagtcaaagaaactatcgtcgccctgcgtgagggtgtcctcgttcaggtagttgtccttgctcacccgtgtttcggtaatttgaaaaatcttgctgtgcataactttaaatttttaatttgttgaacttgcttttttcttctccctgctttcggagcctttcggcttccttggcgggagagattttacatgcaagccagacagcggggaaaggacggaaaggcaagcaaacggccggagaatttcacggaatacccaacccgtcgaggtacgaggcgggggctgaaaggccatcttcgatttgcggaaggctgccgggcaaatccgcgagccgttagcatagtggtgcttgacgccggacgaccgctgtacctttgcatgagaaaatccaaccggcgaggaggcaacgggggcgagatcagggaaagaatgggataaccggaataaaagaggaagaagcccgattgtatatagaagtgggaataacggctaaaaaagaaaatctgcctgtgagggcgattgacaaaaaaagccccctgaaccttttgaccgtccaagggacttcacgtgcccggcaaagcggaattttcggaacgcgagccggattataaggtggcttttaatcgtaatgcataattcaacagatattttcctgaatcggaaaactcttttttatttcctgtatagacatacccgtggctctcataaaattttcttgctgcaaaattttcttccaacacccacaggtaaacctcttttacatcgtgactttttgctgttgtaaggaaatggcgcataagttttgtcccaacaccttctccttgaaagaacggatctacatacaactctttcaattcccatatactgtttttacaatccagtttcatcatcccctttacaatcccgtcatcaaaaacatatatatcgtccaaagctcctataacatcctgataatataatgcaagacgcaataccgacatttcattaaaggaaacatcatcgttttgaaaaatagggcgaaaggcttttcttttagagaaaatctgtatttccgcaagtcttgaagcatcctttatcgtggcaactctaatcatttttttgtttttataattttgtatttacatattattttcccaaaagtttctgttcttcacatactatccggcactgtttccagtatgtttttttcagaagcaaatatataaaaatcaattccacaaggtgccatgaacgactttttttattaagattcacaggaatgtgatataaaagagtttaactcctccgacgttcctttgcagctgcatagggtgtcgtgtgtcttgccttgatttgtcgggtaacgtcaggagcaaaaacgggaaacgctatcgggaggtagaaaggaatggaaatggggtataagggttataacaggtggacgtccgcttaaaaaggaatttcttgtgacatgccgggtatggcatataactggagagacgaccttgcggaataaagcccccgaaaccggctttgcaggttcggaggcttgtgccgcatgaggctatttatcagcgtttgccgtgcgcctgtcccagaagatagtcttgcagggattggtagcggttttgaatattagcgttttcattgaaaccgttcaggcaatgaagcaatgctttttcgagcgtgatgtatcggcggctgaaagtctgtacgttatccaagcaacaggcttccaaagcgtatttgaacggtgcaaaattttcaggttctttccgaatccgcacatgccacaggaagaacaactgaatcgtgaaactgtcggattcacctgctttcatcaaatgttcttcatcgagcaaccgtcggacaagctccggggtaagctggcaatcatttttccggtaatacatgcgttttgccgtattataggctgcaaactgttcgatgtcctgtgccgtctgcctgtatacttccgagtaaaatgcacgtacttctttacctgtaacaacgattttctcgtctccgaactcgtattcatacgctttttcatcggagatttcctcttctgttaaggtcttgaacccgtaacattccgttacgatgaacggttcttttccgaactccgccagagattcgagggcatggaggctgttgcaggagaagaacatgtcgtttccaatactttcaccgctttccagcagccggatttttacgtcttcggaatcgttggtgtacttccatactatccgacaacttgcataatggggcttcctgccgttcgcctcgacaaatccggcaaatccgctcttgatggcggcctttgtcttctctacatccgtcaggacgcttcgtgccttacaggtttcgcaccggccgaattgcaaagaatcgtcggaaatttccgttatcactttggtgttggggtttactgtggcttcgcatactacctgcgtaccgccacatcgtgtacatattatactcatatcttgtcaagattaaaaattaatatatctttctatccgctatattgaacttgtcgataaggttcagccaatggctgcaattccttttcaacaaaacaatttatccagattctgcttaaagcgtagcattaggcgacacttcccatcgcatttacgaaccgaccccatataggcgcattgaccgcttgtttcatcaaacaaaaaacatgactgccggaatgcctcaaaaattcttatcttaacctgttcgtccagaactttcccttccataatttgattaccatttgcgtgcataatacataaaagttaaattaaactccgagttatttatttccctcctctcggaagcttttcagctttccttgccgggagagattttacatgcagatcagacagcggggaaaggacgggaaggcaagcaaacagccggggatttcacggaatacccaacccgacaggcgcagcaaggagggaactgaaaggacatcttcgatttgggaaggctgccgggcaaatccacgagcggttagcatggcggtacttgacaccggacgaccgctgtacctttgcatgggaaaatccaaccggcgagaaagtggcggaaacgagataagggaaagaaggagatacgatagtggagtaaaaggggaagaagccggactgtataaaaaagccggaacattggctaaaaaaggaggtcgttccgtggaaacggcgtacagagaaagtcctctcgaacttttactgtccgagagggcttatcgtctactctataaaatggtaatgggcattttggcattctccgttcgattgtgtcttttgcaaaacgtcatcgacgctggaatatcggctaaaacagccgttatatatctgcttgccgtcgagcgttatccgttgcaggtaacagccgcatactccgtcacggctacggtcagcgacaaaatagaacacgataccgttgctgtacgacaatcgcaattccgtatagtttatctcggttttgggctgttcggtcggcagacgggtattgaaataacccgtagccagcatgacctgtccggcgaaacgcatggcttctgcccgatattttttcatggccgaagccacggggctttcgtcccgaccgtttccgacaaacgatgcgggcaggcttctgttcctgtaagacagtttgaacatgccgacctcttcctgcaccacgggcaggccgacagcttcgtactcctctttcgtcatttcgatgaaacgtgtgcgttcctcgtccagatagaggcggtaagcgggtttcacccgctcccgcttctcttcatattccgcctgttcccgtgcgttcatgcagttataaacgtgtcgggacactctccgcaccgcattgacgaaagtcgggcttttgcatatcccgaaatgccgggcgaagtcgggtacagtcccgataaagccgtactctttccaatgataggttctcatggctgtctgtccgatttaatccacgaccacatattcattgatactgcagcaagaatcggggttttcctgcgcccattcttcaaacagagccttggcatcctgttccgagcggacggtttttcctgcgacctcgccaagccacgcaaacaggctctccctgtcggcaaaatattcgcagaagtatttgcctttggcagtacataaatcgactatgtatttgtcggtaaaatacttgccttcgctgtcgttggtctcgtagaagcccattcccggctcttcggtctggtaataataacggagcgatgggaatttctcgcacacgaggtcgaatgtctcgttgcatggcccccatgccgtctccgtcgtaaagcggagggtttcgcctaccatttcgaggtttgcccaatctccccgacaactcaccttgtcccagtccttgcccaaggcatccacaagacaccccagccatgatgtcccgaagccgtttttcacggcaggcgtttttctgtcctgcaaatctttcatcaactcatagaggcttttgatttcctgcgcgtcgccctctatcacatacgctgttgaacaccagtttggcataatcgttaatttttattcgttaaactttttcttcccttttttcggaagctgttccggcttccttatcgggatagattttacatgcaggccagacagcgggaaaatgaggaaaaggcaaggaaaccgccggggattgaacggaatacccaacccgacagcgcagcacggcggggaccgaaaggtcatcttcgatttgggaaggctgccgggcaaatccgcgagccggttagcggagcggtacttgacgaccgaatgacgctgtaccttcgcatgggaaaatcacaccgacaagggagtgcggcagggagcgataagaacgagaataaataaaaaggagaggtgaacgggatataacgggtatagaatatggacttgaaaaggaaatttttcggtataattataataaggtgtttccggacacgaggccgggtagccgtcttgtctctgccataaccgaaaggtccagcgaacaatgaataacgcagcatcgttcagcagtcagaaacagtaactatgccgtcgtactgatttacgacaatgccgataaaataaggaaaagccgaaaagaggggcttgccttctttccggcttttcgtgaaagtcctattatccgggcttcccgttattctatacggtccagcctgcggacttctcttgaatcgtccacagacgggcataaagcccctcgtgccgcatcagttcgtcgtgcgtgccttgttcttttacccgtccgtcttccagaacgacgatccggtccgcattcatgatcgtcttaagcttgtgggcgatgacgatgacggtgcgtcccttgataagcgtgtcgatggctttctgcacctccacctcgttttccgggtcgagcgatgcggtcgcctcgtccagcaggataatcggcgcatccttcaagatggcgcgggcgatggatatgcgctgtttctcgccgccggacagcgtgcaaccgccctcacccaccatcgtgtcgtatccctgcggcaggcgcatgatgaaatcgtggcagcaggctttctcggctgccgcgatgatctcctcgtccgtcgcaccgggctttccgaaacggatattgtcgcgtatcgtgtcctgaaacagatagacgtcctggaacaccatcgagatgcggctcatcagactttcaggttctatatctttcatcggaacgccatcgaaaaggacacgcccctgctgcgggtcgtagaatcgggcgcaaagtttcatcaccgtacttttcccgctccccgaaggaccgacgagagccgtcagcgtgtttctcggaaacgcgatggaaacgtcctgaagcaccttcttgtcctgataggcgaacgacacatgctcgaaccggatgtcgccggtggccggcgcctgccgttcgccttccatctccggctcgttcatcagcgtgagaatacgccctccggcaatggagaagtagcggaactccgcaaagttggtcagcgccgaagtcagcgggtcgaacacgcgcgagccgaccacgaggaacagcacgaagacgagcagcgagagttcgcctcccaacagcaggtaggttccgcacagcaccatcagggtcagtccggcccgcaccaatgtaatgctcagcagcacgaaaggccccagcatggcttcctgacggatacaggcacggcgcagttccgcaaaagcatcgcgcaggcggacaaagcggtcgcccagcaggttgtaggctttcatcacgcgaatgccctgcaagtattcctccaagcggttcccggcattgattttggcttgtatctgcctgccgctcaactttttctgcacactcgtgctcatccataggacaagcaaggcgaccggcagtgcggcgaacatggcaacggccatccgccagtcgatccataccagcgagaggaatgccagcacgggcatgacgacggctcccatcagttggggcaaatggtgggaaatgcccgtctcggccatcgtgaaatcggtaacgagcatggacgaaagatcgccggggtcgcgccgggaaagaaatccgagagagagtttccgcagatgttccgccagtgcaatgcgccccgacgcactcatttcgtaggctcctctgaaattggcccggtaggaggcccgttcggccaaagccatcaccagcatatagacagccaatatgccgaaaatgcaccacagtcttgccgtgtcgagcggtcgtccgctgccgtcgaacgcggcgaagatgatgcgcaccgcctcgatggagaggcagaaaggtatgatgttgaccagattggcgagcatggtatagcccacgggcttgtaaagacgttccgtatggcctatcgtaatgtttttaatcgcattcatgttccactcctttcatttatgtgcgacgatatgcagttcttcttttttctgaattacccggatgtcggaaaagccggcttgggacagcaactgtttcagttcttcggctccgtacaccgtcattccctttatccgctccgtccacgcctttccgagttcggggtcgctcgcttccagactgatgagaaagcagccccctttccggatcacgcggaagacttcggccagcgccttgctgacggaagaccagaaatagacggtctcgaaggccgtaacggcatcgaaggccccgtccccgtaaggcagggagcagacatcgccctgctgtatgaaacatcggcggtccagttctcccgcattgtgcctgcgggcgaaggcgacgctctcctccgacaggtccatgccgtaaacttttccctgcggacacagcttcagcagacgcttcacgttggcgccgcccccgcatccgatgtccagcacattccattccggccgccagtccacctgtttcatgccgcgatgggccagcgaagcgtggaaacagttcattccccgcaaaatcatccgtccccagaatccctgcggacaactcgtattctgtaaaatatcgttcaagaaactattctttttcatatctccgtattcaatttttgttcaacttccaatgataagcgctcgtataggcatcccacatgttcttgtagagcccctcggcgacggataagtcgtcgtgctggccctgctgtacgatccgtccctgctgcaagaccacgatgttgtccgccgagacgatggacgacagccggtgggcgataataatcacggtcttgccttttatcagggattgaagggcctgctgcatcttgtattcgttctccggatcggcgaaggccgtggcttcgtccagtaccagtatcggcgcattcttcagaatggcgcgggccacgcatacccgctgcgcctcgccgcccgacagatacacgccctcgtcgcctattctcgtctcgtagccttgcggcagccgctcgatgaactcgtggcactgggcggctttggccgccgccacgaccgtttctttcgttgcggcgggggaaccgacggcgatgttctcgtacagcgtgtcgtagaacaggaacgtatcctgaaagacgaatgaaacggtatccatcaactgcgtcgtagcgatgttcttgatgttcacgccaccgatgagaatctcgccctgctccacgtcccagaaacggggaatcaggttcgcgacggtggacttgccgcttcccgaaggccccacgagcgccgtaatccggccttgcggcgccgtgaagcaaacatcgcgcagcgcctcggtacgtgtgccctgttccgtattttcgtaggagaatgacacgtggcggaactccacctcatacgactgcggcacttcggggtgttccggttcgggaacgggctttttctccagaatgcggtcgatacgcgccacgccttcgtcgatctccttggtgtttccgcccaggaacgtcagtttgtagatgggcgaagccacacccggtcccatgatgatgaaaaacagccatacggcggccaatgcgagcgactgcggattcccttgtatcagcaggatacccacgggaagaatgaacgtcaccatcgaacccagcaggacggtgaacgcgatcatcccgttctggtaggtgtcgcagcatttcagggcgaatgtcttgtaagcctgtatctcggcgttgaactgccggaacgagcggacgctctgtccgaatatcttcaccacgggcattcccctgacgtactgcacggcggaggcgctcatcttttcctgcgcatcatagtaaatactcatgaactcccgtgccttcttccccatgaaattggagaattgcagggcgaagctcaacagcaccacggccagacagaccgccgtcagccatgtatccagcgagaaaaagatgacgagcatcaccacgaccgtcgccactacgttcaccaaatcgggaatcgtgtgggcgatgaatccctcgattttctcgatgttctgctccatcgtcttcttgatggctccggtagaggtgttgttgagataacccagcgacagtttgccgatatgctcggacagccggacacgcaatccgtacagaatgcggaatgcagccacgtgcgaggacatcagggcggcgtacagcagcaccagtccgccgataagcccgcagaaggcgatccagccccaacgaatcatgccggcttcgtccaccgaagccgggcttgtaccgtgcgtcagcagctctttcaacacctcgtacaccgcccaatagggtacgagcatacacacggcgctgcctgccgacagcagacccgccagaaaaagcagccctttcttctgccccgcgatctcgaacaggcgggacagaccttctttcttcttttcttttgtttccatatattgaattttatccgattctctctatccgttgttggtaaattcctgtaaatcttccggccggattacaacagccccgtcagccgctccccgctcttttgtcagccggaaatcgcagcacgaagcaccgtgtgccaatgtgcgggtccgtgtcagccggataccgagtacatcgtgtgtgatataatcattcacgcagaaataggggaaaaagcactcgacgccaatacgggaacagagttcggcgaccgggcaccgggcaatgtccataccgacatcgaacgtatcgtccgcattcggcaacacgcaatcgaacagccaatcgtcctctgtggaaacatgcgaagcggaagcgatgcgacgcacatagtcgggcgaacacaacatttcgcgtatttccgaaattttttcagaagggatactcgacaacgtgagctttttcaatgctttctgcgtaacaatggaaagttctgccggactccatcctctggccgacagttcttgccacagaccgatctcataggctataccgataatgtttttcacccatggtgatgtcggcgggacatccggaatgattgcggagatacgatgaaaattctcgacagccgcttccatcacggaatcaacggattcgaccgacaaacgggatgccagttcttccctgaaaaattcttcgaaccgttccaacattgggagataaggttcaatcgtcgtctctttcatctttcatggagaattgccgccgtgtcacgggaattcgatacgatttcatatcccaacatcgaactgaacttgtagcacagccgcgtcatccgtcccaatatttgcccgaagaagaagccccagcgcggacggaaaaacttcatgtaattggcctgttccaaaaggcgtaggcggggttcccattgttctaccagacgcccgtcgctcagaccggagcggatttgcgcctcgtgttcacggagcgaatcgggtttcactccgtgacggctcatcatcgtaccgcagacgtcgaaccacagttcgccgcccccgaaacgctcggccacatggtgcagaaatgtttttacctgcttttcatagaaatacatcagcacgccttcgaccacgaagatgaaatgcgcatcgggatgccggcgacgcaggtcgtccagccagccggcatccagcagggaggccgcaatgtaggggttgcccggctgctccggaatcagctcgcggcgcagcgcgatgacttccggcaggtccatgtcgtagaatacggccttcccgtcgccgatacgctggaaacgggtgtccagaccacagcccacattcaccaccaccgcatcggcgtgcttccctatgaagcggcgcacggcacggtcgaaaaaccacccgcgcacgacgcagccgacctcgctcaacttcgccccgtcgaaacgggagtagtcgtattccagactgtccaccagcccctccgcaaccttgtcgttcagaatcgggttctttcggcggctctctttcgccctgtaatagagcggaatgagcaatgtctcggcgacaatgctctcgaatttatgtctctgtttcatttgttatgatatttattaatgaacgatattcagatttgttcacgaataaaaaaagaggaaacctttgtgaagatttcctcttttcccgctgccccgttacggcagcttgtccgtatgtgtcttttctatctgtcataccttgataatggccctccaaccttgaatttcaaacagaatatagtcatgcagaatggattccatttcctgtttgggcaccgcgtgcatcaacagctcctcgaacagcgtgaacatccacaccgtatgcaggtgaatgataaaatcggacacagccgtatttatattcgggtacttcttcttcatggcggcgaaccatgccttgaccagcccggtcgaacggtcggtgtagctttcgcgaaaatgttccagcgaagagccttgggcacggaacaacaggatctccagcaggctgcgatgcgtttcgatgagcgaaacgtattcgtcgatacaggctttcaggtatttttcggaacgcatcgtcatcacgtcctcgccgcgtatgccgtgatgctcctgcaacatggcttccatagcgtgcaggacgggacggaccacttcacagaacaattcgtccttgttccggaaataattatatatgttccccacaccgacaccgacggctccggcaatctcgcgcatggaggtcttggaatacccctgctgcccgaatcgctgttcggcgactgccaatatgcggccgcgtatgtcttctttgagtacctgcataaataatgaacgatgtttccgtttatatttttgcaaaagtacggggtttgaatttactggacaatacctatttatggtgattttacatgattgaaataagggaaaagcaggtattaccggaggtagcgaaataccttgtctatatccttgtctatatccgaaaggaaaagtcatattgttcattgaaaaggagaaagtctcatagattataattacttttgtacataaaacccaaagaatcaaatataaaatggcaaagattacagtaaaagacacaagtgtcacaattatatcagtcaacgagaatgattatatcagcctgacagacatagcaagatacaaaagcgatgacccgactgcggttatcgggaactggctgcgtaaccggaatacaatagaatatctgggtatttgggagagtttgtacaacccgagttttaaacccctcgaattcgaggggtttaaaaaggaagccgggctgaacgcctttaccttatcaccgacaaaatggataagtacgacaaacgcaataggcatactctccaaatcgggacgctacggcggcacttacgctcacaaggatatagcatttaagtttgcaagctggatttccgttgaatttgaactgtatattataaaggagttccaacgattaaagaccgaggaacaacagcaactcggttggtcagccaaacgggaactgtcgaaaatcaactaccgcatacataccgatgccataaaacagaaccttatcccggcagaggtaaccgccaaacaagccagtattatctatgccgatgaagccgatatgctgaatgtggcgatgttcggtatgaccgccaagatgtggcgtgagcaacaccccgaactgaaagggaatatccgggactatgccacaatcaatgagcttatttgcctctcaaatatggaaaacctcaatgcagtatttatagaccaaggtattccgcagggtgagcggttgattaaactcaatcagatagccattcaacagatgagaatattgggaactggcggcagcgaacgcaagttattaaagtagatgagtctctatcagaatttgtgccgagtacgtgatgaacaatacactatcaaaccatgacgaataaagatgaaatgacaatgaactctgataaaaacgcctattttctatcgcttccggagataaccgaattatccgttcctcctaaaacgatattgttggaagaaggcaaggtagccgacagaatgtacctgatccggaaaggttgcctgcgcctgtttttcaacaacgaaggacgggacatcactttccagttctttttcgaaggggatttcgtcgcgtcattcgacagcctgtatcaacggacaccgagccttttttccctggaaagcatagagccggcagaactgtcggttatgaagcgggaagattttttcagaaacctcggacagaagcccgcgctacggcagatatacgaggaaaaaatcatcgaacgcttccatgtttatcagcggctcttcctttcccgcataaagaacaccccccaacaacggtatgaagaactgctgaaagaacacccctctatcatacagcggattccccagcattatattgcctcctatttggggattacttctgtttccctgtcgaggatcagaaacaggcgatagttcatttctttacatttgttatcgtccggttccagtcgaagatgcgaactttgccgcatctattaaaaccgaaagacagatgaaaaagatttttataatagactggagcctgattcccgtgtttgtcctgtccgcatactccggaatcgaattgcatgtggccgactatgaaggcaatcacgaggtatggcataattgggcagttttccatgtcctgacgagcctgctgttcctcatggcctccatatttcatatagcgacgcattggggctggtacaagggaactgccaagaacggaataggccggaaaagcaaggtcacggcggtactgtcggtcctgttcctgtccgtggttctgaccggatttgccctgttaggcatagaaggagcaggttccccggtcgggcaatgtcatttttgggcaggaatcgttacaactgtcctttctatcggccatatactgaaacgccttccgttgctacgcaaatcattgaaataagcacaacctattcaacggacaacttccggacaaagcgttcttacagaaatcggggtacttattacaaatgcggcttcttgcttactgtcgagaagaccgcatttttctttatttttcggcatatcattcgatttcagcattgctcgtccaaccatttggggcatccggtccattcgttgccccttcaaatccggcatcagagaatggctgttgtcataggcaccgacttcatgcagttccacgaatgaggcatttcctccgtaacggtttatgtttttcacgagcttacggcctgtccggagaaaacatacgtgccagtttttcccgacgagattccgaaaagacattaaaatagttgaagaataaaatgttacgcatacaattatgtacagaatcctttcatttcgaaccatcatgccttatttataccggacgggggcaatgtcgctcccgtaaaataattaaggattatgataataggttatttaagggtcagcacgggcaaacagaacccggctaaccaacaagacgagatccggcgtttcgccgacagtagaaatctttccgtcagccagtgggtgacggaggtcgccagcggcaagaagaaggggtgcgaccgcaaattagggggactgatacggcgcatgaaacggggcgacacgctgattgtcacggaagtttcgcggctaagccgcacgctgacggacctcatggccatcatgggcaagtgtctggagaagggaatcaacctttacacaaccaaggaggggtattcgttcgacaactccatcaacagcaaggtactttgtttcgcgttcggtctggtagcggaaattgaacgcaacctgatttcgatgcgcacgaaggaggctctcgccctccggaaagccgagggtgtcgtccttggtcggaaaaaaggcagctacacgaaaatgaacgtgctgatcgaaaaccgaaaggtcatcgttggcatgttgaagcggaactgtacgattgccgatatatgcaggcgtttcgacatttcgcgggatacattcatgaaattccgtagccgctataaggaaatagataaggccatgaaagagaaagagataagacggaaaggggagttgcaaaaacggagggtatgattttacgttggttaaatcgttggtttaatcgttcgttttcagccacaaaattacaaaaacacgaattatccacaaaaaaaatctgcaaaaaattgcgtttcagttctttgagtaggacaaattttcccggagtgtccgaataatacgaccttttttccgatagtctttttaacgaacaaataaatcggcataactgacagttatccggctgattatttgttggttcggtgcttttttacctctaaagaaagaagcacggcacggacaaacgtacagagattgaataaatagctgatataaataaattggcatagacagaattatgacaatgaaacgaatactgttattatttcttttattctgcggcgggtatgttcatgcgcaagagttggactcggcccgtatccattaccggcagggccacagggaagtggacgtgctcttccgggacaaccgcgcggaactggagcgttttatccgcaccctgcgtgaagaacacggtgcggaccgccttgaaagcgtcgtgatacgctcgtgggcatcgcccgaaggtgtgaaccgtctcaacggggtgctgtcagagcgcagggccgactccctgaaatcctatctcgtgcgccacgccggaatccccgacagtttgatctgcatacatggagaaggtattgcgtgggacatgctgcgccagatggtcgccgcctcggacatattatacaaggaagaggtgctgcatatccttgaccatacgcccgtatgggtgttcgacaaggcaggtcgcgtagtggacggacgcaagaaacagctcatggacctgcggggcggtatgccgtacacctacatgctggagaatttctttcccgaactgcgctccagcctctcggtggcctgctaccggaaacccgaaccgcccgtaaaagtcatttcccaaaaagagacgaaagtgaaagagccggaaccggccctgcaacccgatagcgtggcggaaccggcctccgagccggcaacggtgcggaaggaagcgaccgtgcaaccgcatagaccgacagtacagcggttggccgttaagaccaacctgctctacgatgcgatactgatgccttcgctcgaagtggagtaccgtatcgccgaccgttggacggtgaacctcgaaggcgacatggcatggtggaataatgacggcaagcacaaatgttaccaagtagctacaatcagcccggagggacgctggtggttcggacagaagcaaggcagcccgtggcacggccactacctcggcgtgttcggcggcttcacgtggtacgaccttgaaaacggcaaagagggctatcagggcgaggccgaaatggtgggtgtcagctacggctacatgttccccatcggacggcggctctcgctggaagccggtatcggtctggggtacatgcacagcaagtacgaagaatatcttcccatcgacgggcactacgtgtaccagcagacaaaccgaatgaattacttcggtccgttgaaactgaagtttgcccttgtgtggcggttgtgggataccgataaaaagaaaggaggcgcacgatgaaagcaacgctacgatataccctcatggggcttacgtttgcaggattgacattcctttccacgagctgccggaaagacctgtgttacgaccacgacgagcatggtctttccgtgaaggtgaatctctcttccgactgggaacaggaatgggaacgtacttacgcctatgactgggaaaaattgtgggaagaggactggaagtacgactatgaagatttgtgtcctgctccggccgacggaatacgtgtccaagtctataccagcgacggacagcgtatagagagcaatctgcccgatgaaggaggacggatcgccatgccggaaggcacgcacgaactgttgttctacaacaatgatacggaatatatcgtgttcgatggcgtggccgcttcggaatccgccacagccaccacacgcggcgtgacccggagttctttccatgaattgcacgcgggggaacgtaccgtgaaccagcccgacatgctttacggggcatacatggaagaatacacggcagaaaaaacacttgccccgacggagctgccggttaccttgcgtccattggtttacacctatatgatacgttacgagttcgaaagcggacaacaatacgtggccttggcacgcggagccttggcaggcatggccgaaacggtctatctgaacgatgggcataccggagaaaccgcagccacggtaatgttcgactgtacgctggaagattacggagcggaagcgctggtacagtcgttcggcgtacccgactatccgggtgaacattacggacgaaacggtacggacgggcgaaggtacagcctgaacttggaggtgagaatggtgaacggcaagttcaagaccttcgagttcgatgtcacagaccaagtgaaaggacaaccacggggtggcgttatcgtcgtgagcgggctgtcgatttccaacgacgaggggctggaaggcggaggcagctttgacgtagatgtggacggctggggagaatgggtggacataccgctgcccattgactgaaacgaataaaacaacaggtactaaataaccaaatttttaatttaattttttacatcttatgaagaaaagtttttttgtgcttggagtggctgtagcagcactggcaagctgtacgaacgaagaagttgtggatatgccgcagagccgggcgatccagttcggaactttcgtgaaccattcaacgagaagtagtgtgactgaaacaacggagcagaatcttcagaagttcttcgtattcggaaactatgatgattcatggacttccgtatataccaatgttcaggtagacggaggcactgtaggagcggaggggacggtttggaatcccacacagactgcttattggataaatggcaagaagtaccgttttggcgcttactccaatggtggtaataaaattgagaatgcagagtttaatgcaacctctcgagtgttgacattcccaaattactcggtagacaatacgaaagatttgattgtggctataccccaagaggtgactgcaaaagaagctaataatggtccagtaaacttatctttctaccatatgttgtcgcaggtgaagttcacgttcaagaacacggacgcttatgactacaccatgaaaatctccgacatcaaggtgaatgcagtaaaaacaactaatgttacagcgacttatgccgaaagcgggaaaccagatatcaattggactactcaaagtgtttcaacagaggactatgatttcggaacattaggggatattgccgaagactttaaggacgctacccacactacgacctgctttgtcattccacaaagcaacgaaaatctggaagtaacctttaccgcaactttctatgatgcagcaaataaacaattaagtgaaaatcagttcaaaggaaaattggcatataaaggcgatgttagcggcacagtacagaaccaatggactgaaggtttcaaatataactatacagtagaaatcaacggtagcacgattgatccggagttgaaggagcaggtaattgagttcaaagttattgatgtagatgaatgggctgacgcatcaaatagtgatgtaaccccggaaaacgccggagagtaatcgcttgcatcaatagccgaaaagacatcacatcaggctatgaggggttgaatgtcccctcatagccactaacgggagtgttgctccttatttacgctaccggtagcgtcagaaataaccggatataaagaaacaatgtatgattatgaataacaacctattcaaaaccttgttcataccggctgtcgcctgcctgctgggagcctgtacggaaagcacgggcccggacatggaaacaagcggcaacagcggggcgatccgttttgccggtcccgccgtgacacgggccgccatcgacgacgcggacggaatgttgaccgatggaaactcgttcagcgtatgggggaactacaccgacggaacgggcggtacggccacgagcgtgtttaacgccgaaaaagtgacatacgtttccggcatgtggggttacgagggcacgagatactggctccccggtaatacctacgacttctacgccctttatccgtctgtggaaacgctgggcgatgccgtgtcctccgccacctgcacggacggcacatttaccgtcaagggcttcgacgccacgaaaggacacgacctgatgacggcgaaaaagacgggtatctccgtcatggcaggccagacagagcctcccggtccggtagccctcaaattccaacatttgctggcacgcatcacctttgcggcacgcagtgagggtggcaacgccacggtacattccatctcccttgaggggctggatgtcaagggagattacgacagcggcaaggaacccctgtggagcaacacggcagagggaaccgtcagcgtggagaaagagacttccgtaaccccagccggaaatgcggacgtgtcgggcgacctgctactcattccgcaatcgctcacggacggggtgaaactgactgtcacctacgataccgatgccgagaggggaaagaccgcttcctacaccttgcctgccaccaccgtgagcatgtgggaggcggcgaaccattaccgttactcgttcaccctcaccggcggaggctatatcgtgttcgactcgcccacggtcaacgcatggagcgacgccataggcgggaacgtaaccatcgacgtgacccaataacccaattataagctatctgtaacttgacgataaaatgaacatccaaatgaagcaacgatacatacttccggctctcctgcttctctgctccgcctgccagcaggaggaatgggcgcagcccgaagccgacagtcccgacgccatccactttgccgccccggccattaccgtggagaaactcacccggagcacgttccacgacgcattccccaccggcggcacgttcggcgtactgggctactgcgtgccttatcagcgtggcagtaacaccgaaaaggactgggcatcgggcagcgcgaactggggtaacaagagcggcaacgccttccccgacgtgttcttcaatcaagccgtcacctacaacggctcggcctgcacttatgactataataacagtggcggcccgcgaaaatggtacaacacgacggaaaatccggcggcgacctcccccgacagctatcggtacacctttttcgcctattacccgaaggacggttttacagtggaaagtcccgccagcgccaccacacggggcgtgccgaaactgacgttcaccatgccgttcggcgagacgggcgatgtagcgactaccacgttgaacgacatgcagacacccgacgcgatggtttccgtcgtctataaccacctgcgtaccacggggaacgtgggcttcaatttcagccacatcatgacgggcttgggcttcgccgtgaacaactacaattacggagatgaaaagaaggaaactgttaccgtcaagcgtgttaccttgtcgggccacttcacccgctcgattaccatcgatttcagcaagaataccaacgaagagggattctacacctacagcggcacctatcccggcacatacgagatatataacaacgagacagggcttgcagtagctcccaacagttccgtcagcccgataggcgacaagcacctgcttctgttgagcaacgccacggacggcacttatttcggcaaggacgtggaggtttccgtcgaatatacctacaaaggggcggataagaccgctacagccgaacgtccgacacagttccagccccgtgcgggtgtccgctatacggcgcagctcaacttcgtgggcgaaaccttcgcgctgaactttattgccgccgataacgagttctgggaagacgggggcgacagcgacgtctctatccaataaaacaacaaccgaaaacagcataaagatgaaaaagatactttattatttcctgccggtggcctccatgctcttgccggcagcctgcaccacggaggaggactttggcggcggtaccgttccgcccggcgacggattcaccatcgaggccgtctgccagaacatgctgccgcagcaagtcgtcacccgctcggccatcgccaaggacgacaaggagaagcgcatcaaccagctctacctgttcttcttcgacgaaaacggcgactatctggaatcgagcaacacgaaagtattctcgccgtatatggctccgtcggcgaatacgaccaatgtcagcattcctacggacgtgtttaaagatccggcattcgcaaaaaaaactaccatctacgctttggccaacgtgactccggaggtggtaactgatgccaacggcgacggttatcccgataatttcccccaatatagcaaagacgggaaaaagcccaaggagctgctcgaagcgttcgtgtacgatcctgccaattatactcctaacacccgcgatgacatcacgaccctgcccagcacgggaatgccgatggcgggcaagagcgcgaccgtgaacctcaccgagaagggaagcctcacgatgcagctcaaggcactgatggcccgcatcgacatcaacatcagtatcgattccgaccactcggacgagagcggacaactgccccgcctttccattgcggaatggggcgtgtacaacatgcctaccgccgtacccctgaccgagcctgccgatggccagaccagcctgactaccgatgagccataccgcaatgtagaaaacatacagagcgatgccgtcgtttacaaccacggcggggccgcctccctgaccttctacatgttcgagaacatgattgaaccggacgaagatccggaaaactatcagtatccggctggagtagaggacgatgttgacaagcagcggtggaagccgagacttgtaggcgaaaacagcaaggctacctatttcaagatgagagcctactacactacctataacggcgacccctccctgcccgcaaatcaggataacaccaccatcgaggccgaatataccttctatctcggaggcaacccggtgaatgacttcaaggtgatacgcaacaggcactacgccaacaacatcgtcatcagcggactgacccatgtgggcaacaacccggaccacatcaccttcgatgcccgcgtcaacatcaccgagcagaacaacccgttctacctgtccatgctgcgcgagcgtgaccacgacgcccacttctgtatcacacctttggacgtgtacctcttcgaggaagatgagaatccaaagatgaaagtcagcatagccgacccggaaagtcacacttggatacgcatggaacgtgtgccagccgaaaatatggagaatggaacactctctgccgacatgagtacagatacccatttggcgaccggacagaaatggactgcgggaaacggcaaacgcaaatacttcaccacggacttggtgaccaacacccttgcccaaaacaccgaatacaccatcagcaggagccgtgaccgcatctatttctacttggacgaaaacctaagcacgaaagaccgcaccgccaccgtcaacatctcgtacaccgacaacaacacgcagacgccacgtacccgtaccattgaaatcgtacagcacggtctgttgccggtacagtggtattatgaaggcagacttcaaggcactatctacgtggaagcctatgaggaatatatatcccattacgaccccctgaacgagtttgaaggggattatatctatgacggtttggaatggggttgtaatggtgaatacatcggaggtccgctaaataacgaatggacggaaggaaacaaacatggggcggcagctacccggcgcattattacccaagctggacaatcagaaatgaacctgaacgaaaaaccccgctcagcggcggaatattgctataacaagaacaagcgcaatgccaatggagccgtacagggcatgagcaattcttccggttggttcctgcccggtatctcccaactggaaagtattcttacctcttattacaatacatacacggagttccagaacaatttctactggtcatcggcggcagcaaaagatagaacaggaatatggcctgcgtatatctatccagagagcaccagctatgcccgtgccaccaaggccctgccagacggtggttatgcagaaagtgattgggacgatatatacacgaatgataacggcactaccggtaaagcaccccgcatcaatagacctctccgcatccgtgcagcctacgtaccgcccagtggcgtaactatccagtgacaaccgccaaactttaattccgtgtcttactcactgcccgtctgtaggaaacccctctacaggcgggcagtgctgtttttattctcccggtatgtctttggcctgtacaaccgacatgcacacgcacgttttatacgtcggtcgggatagaaaaaggtgtgacaatatcaaaagaacctattcaacaaaaagaggtttgtagcctccccaaaagcccctcaaacctatggcaaaggcatcaaggggcttttcttctatcagcgaaacagtaatagacatttgggttcgcgttatctgattgtgtcgtccgcaaaacaccttcggcgtcggaactttatctgtcatccgacagaaatacgataataaatataggatttctttaccgctttttatttcttcttcaagaaacgttccgtgagccatttgcgcaccgggagatcatagcacttcaggcaggcataggcaagcgcgaacgccccgacgaacgtgagcagcatgtaaggaaggccttcggcaagtgtcgcctgacggttgaacgcccatgccgtataaatatagaccagcggatagtgggtgatatagacgggataggatatgtcgcccagaaacttgcatacggcagcggagcgtttgcccgttatcctgcctcccgctcccatcgagacgataaccgggaaaatgcagatgatgcagaaagcctcgtaaagcccgttcatccaatacccgtcctccccaccgatacggggcgcggaaagcacggcgattatcatcaggctgcaccacccaaaagcattcttgcgggtgcgtatcagccagccaagccgggacaggagcagtccgccgaagaaggggtacatcagccggaccagtcccacgtactgctgttcccagttcaaagcccatccgcccacgatgtcgccggcaggtgcggtaaggcagcggtgtaccgtgaagcacgccgctatcgccacgaggacagtcaatgccgtcttgctgaacttgcggatgaacaaggcgtacaatatgttgccgatgtattcgtagtaaagcgaccatgccggcccgttcagcgggtgcatttccatccatccccggacgtcccacttcagcggcagaggcagcaacgtacaacccagcagcatgaccagcagcaccgcaccggcggacacgccctccattgccggataacagggggcatcctgaaaccaaaagagcgcggctcccacgatactccccatgaccaccataggctgtagccggataagacgacgcttgaagaaggttcccgtgctcatccggttccaacggtcatcgtatgcgtagccgatgacgaagcccgaaagcatgaagaagaaatctactgccagatagccatgattgataatctggttcagatggttgccgccggagtgcgcttccagcagatgaaaggccactaccatagcagccgccacgccgcgcagtccgtccagaatctcgtagtgcggcttcgaggtcaaataagagttttgcatgttcatgaattataccggtaaaagactgaatgcaaagatagtatataataaataattacgatgttcgttaccgattagaaaatatcaaacagtcagatttccgtttaaaaagagagccgatcttcacagacaggctctccataaacgaaaaaaaatgtttttatatcgtatgaacaaaaagtattatttgagatgcagcacaacctttgtatggcggttggcctcattgggcgcataatcggaaatgccgccttggtgagttttggttatcttgtcgcccgacaccccacgtttgattaattcttcagcgatataatcggctcttgatgcactcaagacattgtttacggatgctgttccggtcatactgtcagctgcaccaatgacgcttaccgataacccgtacttcttcgctactcttgccaactcgtcgagattaagcgtctgggaggtatccgtgagacgcgccgtattgagttggaagaagaaatacacgggtgagccgatacactcttttccgttctgcatacgagccaaatattgcatacagagtgtgtcttgacccgcacaaaggggaattgtgtcggcagattgtgtacccttcccatccaagggagatttcccgtcccacttccggttcttaagtctcgcttgaagcgagttcagaccgctgtaattgtttttgggataacggttgccgtcgaatgcatcgtcgtcatcaaaaagatggctgtacttgtcgagcaatccttcgatttccagaatctttttcagctcagcgagtgcccgtcggtctctgtcatgctgccctgcataaagacggttctcttccgacaaagcatttacgcgctcgacaagccactgatcgcggcggatataaggacttgggtctatggcgcgtttccaaccgaccctgccgatatgaaaagaaaatccggcggtaagcgataacatgtggtcaccaaaacggttctccttaccatacccgtcgaaatcttggaaagtggttgcgccggagagttccacgagggcgcttacccttttggaaatccggtactgcccctgtataccataagagactgcaaacgggttatgcccgttggtcgcatgatgcagcagcccgataccggcaaagggagccagatgccagcgtacctgttcctgacgggaataactgccgccgagcacattccatagcagatccgcatggaggtggtggtattcctgcacggccagcgtaccgtccttgaactgcaagccgctataatttatgcgtgcgcctacccacggggtgaaccacttgccaatggcaaggctatacgagggtttcaacctcccgaacaggtcttcgcagccaagcggggtgccgagaaaggccgtcgtgcctccggcgatactgacgaaccagttgccgtttccccgtgccgggacgaccactccgtcaagatatgagggctgtaacggctgcagcagttcagtgtcatcgtaacggaacatgcagcgtacagtatccttctccgtgggttgtacatccgcacgggcttgcagcgtacagaacgccgcaaagataaagatgatattctttgtcataattccaattttttaattgtaatctattcagttttcaggcaatctttgccatttatcgtttgggctttttgccgatggccggacgcatcatgcggctcgccattctcatgcagcggagcgcccatgcccggttgtcctcgtcgtcatcgcgtccccatttgaggtcactgccgccaccacctccgccacgtgtttcggcaaatgtagtggcatcatcgaccatgccgaggaacaacagtgtggcgcagtgcatgacttccgtgccttgttctgccacggagcgcacgagggtgccatcgaacagttgccgttcggagggcttcatacgtgccgacagttcccgccactcatcgaccatgttttccagcatggcatccttgagcaggctgtccactttggaatgtacatcacgggtgtattcgtaggcttcttccttaagctgttccgtgcgttcctgaatggcatccatattctctttgaggtcggaaagctgtcggtcggcagtctgtaacttctcctgtttgtctgccagtttcccttggatagcgaccagttctttttcgagtttctctttctcggcggatatggccaaggcatcgtcttttcgggagttcatgtcattttcgagtgctgccagttgggcctccttttcggatttctctcgtcgcaggttttccaccattgaagtgagaccctttaccctgcgctctgccagccgtatatccgaatgaagatcggaaagcactttttggtggcggtcaatattctcctcgatagttgtacactcttccgagagcatacggcggtattcttccgtcgtcctgtgccgtgcgccggtctcggcgacgctccggcctctcgccattccccatttcgtgttgacctcggcgaaaaagtccgtatggagctgtttcattctcgcactatattcgaacttgtcctttccggcgaatatctccttgtacgcaaacttcccgtctttgattggcagaagcgtgcaatgcacgtgcggattcaactcgtcgaggtgtacaatgaaggcggcaacattctgctctccgtatctgccacaaacgaatgaatagacatcctttgcccaacgttcgatgtcgctcttccttttgatgctggtattgtccgcacctttttcaaaatccaccttctgcgtaccgaatgcgagttcgtgcatccgctcccgcgaacctccaaagatgatgtttaccaccgtgcggtatttcggttcgatcagtccctcgttggggtcctttattccgcgacggcccaatatgtccgccatccgttccgggatattacggctcgtgtcaatagggcgtatcttgcctccggacgcaatctcgaagttcagatgtttgcgagtgggatcgtagttgcccttactcatggcgtacttctctgcctctttgctgcgattgcgcagatgttcgttgccttgggcggcggtgattcctttcgacacttgaacgtcaagaacctgttttgcatttgccatactgcttccgtgttatttcggacaatcccccgtgtcccagcttgctgcttgtacggacacccttcccaccgacgaatgtcggtcggggtattaggctcccccttccctttgttcagtggcagacgggcaagcccggatgcctgctataactggaaggatatttggaccggaaccggggcaaattacccgtggttatacaatctttgtctgcgaatccctgttcaactttcttcctgcgccttcgctaaaagcgatagaaagggtttacgaagcgattcgaggcgttccgtctcttcgtccataccgaaatccgttccatccggctttccgtcgataacaagctctgcaagctctttcgaggcttcgatgaacgccgcccattccccaccgagatcggaccggaagaactgcacgagcggtgagccgtcgtcgaatctcgacttgcgcagaacccgccatagggcggcatgggcgatacactccaaaacggtctcacgcaattgttcttctgatcggagggtatgcacggatgtcgtgccggaatggttgtccggataggcccggctgtcctgtccggttatctccgccaaggtctgacgcatgatttgtccgcatgatttgccgacatcgaaagaagttgctttgccaatcacccaatcgtacaatattccttgtattcttgtggcaaagtccgtttctttctgcccactgtccggcatgtcaggcgtgccgattcgcaggtgcatggtaatgatgacgcttttcgccagccggatacgttccaactgcccgaatgcttcgagcgtgtccagaaacgagcggacggtggcgcggtgccaatgccactcggatgcaaggtcggaaacggtcacatggcactggcagggaccgaggtcgtagtcttgtttccttaaaaacggggagacgaaacctgccagcgatttatccaacaggtcgcagtaggcttctgttcttgttttccgctcgccgactttttctttcagatagtcgaacacttccgtgttggccagtatggtggcgggtgcttcatttctatttctcattttcgttctgtttttgatgattcatatcgtgcggattgtatggactgccattatccgcattatcatggcagtcttgcgtgatgatactatgataactgtcggctaatgctccgggatattccagccattcgaggaatttgcgcatgtctgtcctttcggacatgacccttgccgacgggtagaacagggcagccaaaagaataaaggcgatggttacggacatcgtgtacagatgcggcacgaagccgatgaccaatgccaagagcgcaaaccagacgaaacgtttcggccggtcgagcaaacagcgcatccatcggtccgcccgccggaaagaggcccatgcggcacacacaatggtggatggcacaacaccgaactcgccggggtgtccgctcgtatagacataatggaagaggagcaatacgataagcagcacatgggtgtacaacctgcgggccttttcgctccatatcattttatcgtagaattttgccatgaagtaacgtctgctcctgtacaacagtgccggaaggacgacaggcattgcaagaaacacaaactgtaatataatccaagtcataacaggtaatagggttttgaaggtatgtgaacgggccgtaccacgagttccaagcggacaatcccgtgggtggccaagcggataatgttctcggtgtcttcagctgtcagggacgatgcgcctttcttcatccgggacttgaatatgccgttctgcttgcggtatgtagccagtgccgcgtccagatcatgctccggaatcgtccacgtcatgccccggtcgtatgtgccatgcggtttgcaagcacgcagtaccagcgtgcgggaaaccaggaaatcggtccggttgttcctcggaatgacgtgctccttgtagaggttgtcatcggccacctctatccatgtgcggtatgtgtcgatgcagaaaatcatctggcgatatatcgtgtttcgcataggaactgttttacatgaaatccaacagcacgtcttccagctccttcttgtacttgaagctgccgtttccggtgtggagtttcaagtcgagagacaggtcgccgtacatcagttccaacgaatcgtaaacggtcgcgatgacgcggtttaccttaccgtctgcgtctgtccgggcgttcatcttgaacatttgtccgaaagcgggattggagtaggcacaggtgctatgaccggatttttccaatccgaccggcacatggtggtagagcgtgatcagctccatgtcgtcctcgaatatgtccatgacctcctccaaatcataggggtcccgcaacgggaacgtgagcagaacgtagtcgccgtaaaactgcggttcctccattgtcgccacattgagaagctgcggcatttgcaggggtacgaacgacataaagtcatccaaaaagtgtcgtaacataatcatatatcgtttattttgtgaacaggcttttacaaagaggcgatgaatatctccatgagcataccgggcagctcgtccaaccggtttctttccgacggcaggattttacgcagtgtctcgaaagcgccgggtgtctcggtcgcaatccggtcgagggctttcttatcctccggagagagaagcgtcatacagaggccgtccaaggaagcgtagggctggagtatcatccaaatgtaggcgtgtgcctgttcgggtgttgcgacttcgccccgatgtatgtcgtcgagacaggtacgcacgttctgtatcagtcggcggtcggcacgcagggccatgtatatcagggcctccttgtaggtaatctctttgcgtccggcggcgagaaacacctcggaacagcacttctccgtgtcgcaggtaatgtcggccatgtttgcactgccggaatcgtgcagaccggacagaaaagcgcgaaaaacggcgtcttctttctcgatgaatctcttgaggtcacgactgtcgtgtatgccgtcgttcagggttccggcaagcaacttacgatatgccgacagcgtttgctccttgttgccacggtaggcaggccgtttatccagtgctgcgaaaaacggacggatctcctcggcggaacggtgcagttccacgtctccggcatagggagagaaccgctctttcaggctcaacacttccttgtaggtgcgcggtttcgacagggtcaaccgggaaagttccgagcaaatggaatcgtgtaacagacgacattcttcccgtgtgccggaatgggtctgacgggccgtgtcccgccgaatggctgcagccacggaatctttcaaggtttgccattccccgatacatacggtcagctcttcaaaggaaagttcttgggacttgcgtatctcggagaggtactctctgtacagaccggcaggcgtgtcttggggttccgccagtgatttgccgttcggaccgtcgcatgacgggaatgtgaaaacggcaattgaagcggcagaaagtccagcaatggaaagtatgatttttaagtatgattttctattattcattgttcaattttgaattttacagcgcaaatctaagtattattttcaagatggcaagtgttgaaatttgttttataagctatttttaacattgtacttaatagtttgattttcaatgaaaacaagtgaagaaaacgggaaaatccaagtgctttcttcgattttccactcaaagtatggtttagtttaaaataaaactgttatatttgtacttgttatcatagaagtgtacaattagatggcaaaagtaggttacatatttaaggcggatcgttacgacgggttcgaggctgacaaagaatggatgcaggagtacggctgtgtacaagtgatagaggaaccggtcgaaagcgaggcgctacggcctaaatggaaacagcttgtggcgggcctcgaaaggggcgacgaggtagtggtggccaaattcagcaatgccctccgagggtcgcgcgaactgtcggccttcattgagttgtgccgtatcaaggtggtacgcatcatatccatccatgaccggatcgactcacggggtaaactgtttcccgaaacgacggttgccgatgtgctggagatgttcggggcgcttcccgaagaggtggcgatactgcgatattcgtccgcacgtgtcttgaacctgcaacagaaagcgaagattccgaagaaaacgatgaaggctatggacaaggccgacaaggaaaatactatcgttgacatgtatgtcaacggccattcgtttgaggacatcatggcggtaagcgggtacagcagccgaagttcggtgttcagcgtgctccacaggcatggggtaaaactcaacagggggaaattcagcggccccttgggaacccggaaaaagaaaaaggacgacagtccggcggaagaataacccgtaaaacgaaaagggtggcggcaactaccgcttataaacggtttaactgtcggaaaacgaggttgaaacggattcgcactcttggtaacaaacagcagatgtttaatttattaatacagattaaataaaaacgtagtatggaagtaatattgataatcgttgtgttctgggtagtgggtaaacttctgaaagcggtgttcggcggttttagcaagagcgactaccggcgcgaccagtaacacgtatgagacaacgacggcattgtctcgccggttctttcgtgccaggagtcggaatatgattcgtataaatcaaaagatgaatgtagataaatgaaaacttaccttatcttgtttttggctatcgtttttgaaactgtagccacttctttcttgaaacagagcgaacagtttaccaaactcgttccgtccgtattgaccgttctggggtacgcggcggctttctattgcttgagtgtcgtactgaagagcattccggtaggcatagcttacgccatttggtcgggagtgggtatcattcttatcgcgcttatcggctttttcgttttcaaacagcacctcgacctggctgccatcatcgggctggtcctgattattgccggagtggtcgtcatcaatgtcttctccaactcggtctctcattgatggaagtgtcccgtcattgtgttctataccaaacgaaaagaaagaaatcatgtttttcatcagcatggtttctttcttttttcagcattataggaaggagtcaaatatatacattcaacataagatacaagtatgccttttcgtccttactgttatgatgttcaagttcgaattgtaccttatcttcacgggccaaccagccaatagcactacccaactcggcatcatccatccctgtaattttctttatctctgaaaattcccatttacggagatggtcactattcaataaacgccaaactttaccagcgttctcgccaatgatgtatttatccataaattataatatatttattgttatatgtatataatatgttatacaaatgtacagttttgataacgaattatcgtttatgttccattaatgtttattaatacatcatgcatttggcggaatttttattccagataactgctcagaatgccgctaccaatctttaaacttttttaacagcggcattttacatggaacctaaatccgaaaaaattgcctgcaaattatggcacgttgccgggaatatatccaaaatgtaacgacaatcactaaagtcgtcagaatttcagacaacggtaaggcgagccaaattccttttactcccattatggcaggtaataccatgaagcacggaaccagaaaaacaaatccacgtaagactgcaaatgttatggccggctttatccgttccatgctctgataatatccaataatggagagattcaaaataaagaagatgaatcccgtgccataataagggaatccttctatcgctatgcgtgcggcagtattgtcaatgcgcaagaatagtccgacaagcaattcaggaaacaggataaaggcggcagtagaaatgactccgcaaactaatgccgcaaacacggaaacgcgtaaggcggaacgaactctttccgtgcttcctgtgccgaaattgtaactgataataggctgggcagattgggcaatggcgttacctatcatgaagacgaacgggagataataacagcttactccgaaagcacctactccgtcatctcccaaatggcgcatgaatacctggttgccgatgaacagcaatatcgccattgtcaattcgcctaacaaggcggatgagcctatcttgcactgcattcctatatcatggaagaagaataaaatcctttttctacccggacggagagaatgcaaacgagtgtcacgggcatagaacaacaagtaacccatcgtcaccgttgccccggccaaacaactcagggaggtagcaaatgccgcccccatcactccccagcccagcgggaagatgaacagccagtcgagaacgacattcaccgctgcggctatgatgctgcaccacatggcgagtttcggagcgccgtccaggcgcatggcaaacaaggcgacggcaatccacaactcgaacagcagagacggggaaaaccagaccagataatcgacaaccagcggcagcaaatgctccgacgagccaagcatacgggcggtttcttcgggaaacgccagaatgaatcctccgacggttacggatatgagcgtcacgaaaagcatggcttgggtgatggtcgcacgtgccaaaacggtttttcctttcgacaagtaaatggaagcgattacggaacaacctgcccccatcatcagtccaacacccatgagtgacatcagtagagggacgcagatatttacagctgcaatcccgtcgctgcccacgccgtgtcccacgaaaatcccgtcgatagtcgttaccgccgacatactcaacattcccaacagagtggggaaaaacagtttcttaaacagaacggaaactctctcattcccaaaatcaatcactttttctttcatacgtctttgtattttatattatatggtttacttccggcagaaaacgacggaagccggataagacgatggttttacccagtcatcttatccggcttccatagccctccgatgaggattataaaatgtcctttgcgttatttcgccgcaaaggtgggccaaagatttgacttatccaaaaaaagttgcatttttgtacattgctatttaattcttatatatgacaaaagcagaaattgttagccggattgcacagcagaccggaatagagaaagaggtcgtaatgaccgtggtcgaggcattcatggagaatgtaaaagatgcgatgattgccgggaacgaagtgttcctgcggggtttcggtagcttcattatcaagcaaagggcagagaaggtggcccgtaacatatcaaagaacacaactattgtgattccagctcattccatccccgccttcaaaccggcaaaagtattcctgagtgccgtaaaagagggaaaataaaggacgtgtaaaagtttcattttattttgtagatttgtatctattagcgatttaagagggattaagtttttagtctaaaagataatacagaattgttatgattaaagaattgagagttggcaattacgttgcttataaaggtaaaccatctttggtttgtgcattggattatgatcctaagttgagaaaagagaatatatccgttgtttataaatggggagaacctccgtataaaacaaatggagacattcagccaatattacttactgaaaaattggttttgcaatgcggttttaatcagcttgacgattatacatttgacaatgatgaaatggagattacacaagactgggatgatcaaactgtatattacattaccactcatgctaatgaatatacggtaagcggacaccgcatagaatacttacaccagctccagaatgcgtatttttgtttatctggtggaaaagaattagaagttaacctataaagaaaagaggcttttagaactgcctctttttctttatatcatgcgagggtattatatatttaatccgtcacctcccagtaatagcttaactcgttccctttcagattctctttggcgtattggtcggcttgttcccaaagagtattgtaaagtaccgccatatccggtctgttttcatagtattgccatatcttatggttaagtaccaatgtcagttccgtcaagaacttatagtcccctttccactccctgaaagcccggttgaaagtgtccaaaacagccgccaacccaaatctgtccgctattgagaagtcttcccaaaaggttgtttgtaactcataaccgttctcttgcataaattctttaaatgtcatacgctctaaattttaagtttgaactattttttgtttttccctttggtacaatcctgtaccgaaaggttgattatttttctgcctataggattgacggtcggtccaggcaagaaggctgcgaaaaatacactctccaacaaagtcggggaggaagatttttcgacagcaagcgtaagcggttcttgacaggacagacaagcggcaatcgaactttgcagaaaaaataagcgggctttcggcatggagtgttgggaaacggctgtaaggaggataaaacgggggaagctaaaatgttataaaaggattactttccggctggatagtcacggtacaaaggggaacggaccgcgtttcgataaaagggaaagagccatgaagatataaagggggaattccggcaaaaggattcaggacacatccattgtcaatgtatcccgaacctgcaccggtcattatctgtaccgaatgtttaggaaacccatttgtaaccttcgtccgtcagttcaaaatattcgtccattcccggtttcacaaaaaacatgatttcaaaggcttcgttgcttctaccttcgggtatcgtcatgttgatttctccattgcgggctgttcctcttcccgtattgaaacctaagtcttcgtccgcataggcgtaatggaattccacatccggaaatatctcggaaagtttttggataagcagtggcactccattccatgccgtatcgaaccaaagtatgttcggctcttcaaagtcttggtgataggcattccattttgtaccccatgtggcggtagaccactcgtaccaagtgggataaccgtactttttccgattttccaaatacgatgctccaagttgcagcgcttcttttctgtccttttccgccaatccttctatccattgaatggttctcaaagcatcatcgtccaataaaaaatagaatggcttcaactgcattgcttcaaggtatttcatacccaaatctccactgctgcttttttctatcaacagttcttcaggcataggaatgatgttgttgaagtcgatgtaacaaggcgtattgtcatcatcggttttaccttttaagaaattcattactttttgtactgtttcccggtctgcgtttatttctaaacggtttgtcacatgattaggcataatcttagttttttgaaattgttaatacttattttcccttttgtcggttctttcttcctgaaccgctttggggttttacggatgcggtacacggctgtcgggaaaacttcatacggtggctttccttggaaaattactcttaccccggtaaggaagaattttgcaagaaatgcacttcaagccaccggatcaagtgcgacggcctacctttgcatctggtaaaaccaaaccggtgatggaaagaagaaaagacgggagatatacgaaagaccggggtcggtataaaaggcggatattgctccgtgagtagtgataaaaaggaatggagctgattataaaaggagacggttctgtgtttcgcccattcgataaaggataccgcaaccatctctggcggatgcgttgcggtattttgtggacagcattttatgcggccttgtccggcttgcgctgccttgttttccagccgtacacggcggctacatacggatagagggaacgtgttctccggcggaaaccttcttcgtcgatttcacggttgtaaatcttatcggcgatacgctccgcttcatcacggtctttggcgatacgatacaaggtgtagttcgtaccgtcatgatggcccatccgtccgcgaatgttatagccgtcgccgtaccattctgcatcgtcgcactgggatttcaaaatatcggcaatggtgctgcccaatatttgatagccttgtctccggccgttccataatcccaagttgccgaacacgacaataatgccgtccacttctttattcagattgctccgttcgtcgtccagccagcgatatacttcttctgcccattcttcatcgctgacctcgtaacagtcatcgtccaatatttcccgttgtgaattttgatagtattcttttgccgtttcgtccaacaggtcatagcttgaccaaatcatctgtttcatacgtcttgaattttaagtttgacttttgtttttttatccctgccttcggagggtttccctcgtccggcgggatttgattttacgtgcggaccacaaggcggacagaagggaaacaaggcaaggaggaagcggatagtcctatggacgatttcatttgtgttgaacaagtattgacgagcttgcgagttgatggttgttaacctcaaatgaagccgcgccttgccggttcccgaccgccttaactttgcacgggaaaatcaatggacgacggcggactcttcgtgtggagtatgaaggagtataaaagtatagacgttccggaacggtaacgagcaaaacaaaagcggccttcgggccgctttgtctcaaaaaggcaggaattacttcttgcccttcttcggtttctttgccggttccgcaggaacttcctcctctttatcgacagccggataaaatttgactgcaaccgtcacgatgcggttgtgcagcacgccgtctttgtcggtccattcttcgggtttaaaatagccctccacggtaagcagcgtgcccttggtgagctggtcgaacgacccggtattctcgttcttgcgccacgcttcaatgttcatgaaagcggatatacgcttggtatcttcgccgttcttctcctgacgggccactgccagcgggaaacgtgcgacacttgtggtggtgaactgacggacttcggcatcttttgccacgaatccggttactgcgaaattgttctcgatctttttcattgcgattgctttttgaagttaataaatcagttttacggtgcataaaagtaggtgcagtaaagggctgcaccaaggatagcgcataaatactctttattttggaggcgaagccccaaaccgcaggcccgataaaggaagatttgtgcgatacgccattggtcaagaccatcgggtcgcgcccgtctgcatactaactttgcaacgaaaaacgatatggcgacttcaaatagaaagcggtcgcgaaaaagtcgaggcgaaacaatccgcagcggactcggaaacatgaaagacctgtccgtccaccgacacaagaccgctcccgttccggcaggtgggcgggaagaacatcaggcgagaaagtgtatcggctgtttggggttgaagcggcaagaacgatataccgtttaacaaccatatacgctgcatcgtggaaaatactatcggacgaagatccggcaaaaggcgtgtgcgacgtatcgatatcgctgtctctatccggcaagagaaatgagggaaagaagaggtaaaggaaaaatggccgaagtctgccttgaaacaaagcggagaagccgcctttgcatgagtggccgttcgatataaaaggatatggcgcagccgaaatgtataaaggggtatttccgaaggaaacggtatgagtgtctgttcggaaataaaagagggtatcgcacccgcgtatctgttttagattttagccggtgtaaccgggctgaaactggtactccagcccgtactacatttaccttttttctgttttggtctgtaattctaccggctcgtcatcccatgtcagttctttgccgagaagtttgtaaacagtccctttggggagttctatctcgattggtacattgtacacttcttccaaatactcccaatgcccacaccggccccgaacgggcttttcgggcataatccattctgttccgtctttatttactgccaaccatgccataatatcacatttttagtctgttccttagtagtaattttattcttcttgagctatcattctcttactgtattccaaaattttatccatcgtaagccactccggtttttctccctccttgaagctatcatgcagttttatcataaactcaatttgcaatttttcgtcgccagcccataaggttttggggtgtctgttaccgtaattgaggtaatactcgcagtctgaccgtaagcggtctaacagttggtatctgaaaaccgaatccctgtgtattacttcgtctaccgttactcttccatttgaatttgttacatcgtttgtcataacctataaaattttgagttttctttttccctcttgtagcacctgctactttcgggcctgatttaattatgtcgcctcgaaaggtgtcatagctctttatgcaaggtttcacgattaaatactacccgtgcgaagcggagggtggagattttgtcgtgaaccgtcaggctttgaccttgcatacaagaacggcatgacaagtacctttgcgacacaatttatatcaggcagcccgaaagcgatgtgcgaacacagggaagagaaggtctcgtgtaaaaggttgatgggcgataaaaagggtttgcagcgaaaagagaaatataaacgggtattccggggcagtataaaaattgatcgtgaggataaaagggggattgtgccagcatgtctattgcgagaaagaggaacgggctgaagctggtagttccggttcagcccgcaaagcgcattggaggtcttttgcctgttcctgtcagaaatgggctaccataatccgatgtttgaaaatcctgtttttatcgctcggtcgccgttgctttatccagatatggtgtgctccgtatccgaatatgaaatagtcgtcgagcgtggtttcgttcttcaagcgttccatacttgcccgaagttcggtttcgtcagttgcaaaaagaatcgtgttcatgattcggaaatagatttcttccgcttcatcgctatagcggcaaaagacgtgttcgattgttacgttcatggttctattggtttgattgaggtgtttcgggtacattagtcattattgattctccgtcttgattgaaaatttctattgtcgggttgccgtcgttttcttcggggagcatagattccgatgtatcggtcaatgcttgccactcttcatagcaaagacggttgtcaatgatgttcgacacgtcctcacagttccatgagcggacgattgcctcggcttcttcataactgtccgctttcacactgaaataatcccgttcccaacttgtaaccttacggtcttgataaaatttgtattctcccatatccttgttgttttaaccgcttacttctacaatatcctctattctgccgtacagtatcgagcgtaacgctgttttgtcaatcgcataatactcgtgaatacttccgtgctgtttgacgaaataccgtttgaggatgtcggaaaagtcaaagtgataaccgctcaaggcaattccacgtttgaaatagatactttcccatacgttacgggtaatccagttcttttcttcccggtttaacttgcctccgttgttcaggtgtacccgcaatttgtaaaccttgctgtcctgcaatgtcgccagttcgggaatgtcccatttgacgaattttgttgctatctgtgtcatacgtttgctatcgtttaatcatggataatcacttcatcacggtattctgaaatttccttgccgctttcaaggcggacaactatggtattgccatagtcgcccacgattgtgccttccatgtaacctttatatggattgagcaacgtgcaggacaaaccgataatatcgctatcttcttcgtattcgtacatagtgaattgtgtttaggtttaggataacttaatgttccatttaccttgcgagaatatccgaaagctcacgtattcgtcctctaactcgtatgtcagtatgcggatatagattttgtctttggctgccaataaggctattaattcgttgattgctttttccgggtattcccagcgggaatcaaattcggcatctaccgtgtcgccataccggttgacaaagccgttgaaattatcgtccagaaatgcctctatcttattgaggtcttgtttgttttccgtacttgcgtggaaaatgtttgttgcgtagtttgccataactttgaattttaagttttcttttttccctcttgtagcatccagctactttcgggcttgatttaattatgtcgcttcaaaaggtgtcatggctctttatgcaaggtttcacgattaaatactacccgtgcggaacggagggtggagattttgtcgtgaaccgttaggctttgaccttgcatacaagaaagacatgacaagtacctttgcgacacaattcatatcaggcagcccgaaagcggatgtgcgaacacagggaagagaagatctcgtgtaaaaggttgatggtttataaaaagggggttgcagcgaaaagaaaaatatgacgtggaatgtttttttcttttggctgtacaatgggaccggagtgttttacgaagttcgggaaaaggtttagtttagtccattagcctatatatatgctaaatcaaagtaaactatatttaggcagccaaatttgcctgcctataagtttttccttatctttgtatgaactaaagaatacttgcttttttcttttggctgcagtggttcttggaagctcacatgcaaccatcggacgaaaaaaatctggtgggaagctgttcaagaagtcccgattataagcaagtgcaaagaaagaaacagagtgaaaacaaaaaattgggaaatacctttaattaacgattttgtttcttgtttgttccttaattaaaatcgtgaaattttcaacaatctgattttcaaatcattatataaactatttttgagagattgaatttataagcaatatataattatgaaaaacaaaagaatgattcagaaaatatgtgtgtactgcgttgaaggcatactatttggcgttacatgggtgatattggacaaaaatgtttggcatggcaatcattctgctttagcatcgtttttgtatggaatttctctttatattggtgcaagaataatgatatttttttacttcaaaatcaaaaaaactcttgataactaaaagcatagtacaaaagttacatctaaaaaatgaatagcacaattttatgtaccgtataaaacagagatttattataatacaaaacttataaactatggcttacattgattattatcaagtctttggagtagacaaaacggcatctcaggatgacattaagaaggcgttctgtaagttggcgcgcaaattcatgagttgcgcagtcagttgagtctgttcagatgatatctgttgtggattagttaactcttctgtttccctcctttccgatcggtaatgagtttagttctattgaaatgccgattttctatatgagtatcttttttccgaagaagaaaggagaaaggcgtgctttatccagacagaatgcgatgaaaatgctaccgtacagagtgatgactgttgcggtacagagaaagcatattcctgtcgggtcgaacgaaaagaaaggcagaaagagtttggacagtgcggtaaagacgggggagaaaagaagaataggcaatgtgttctttccgatgaacagtgaagcttgtttcacagtatggggaagatgtttgtagatgtacagcgaaaggctgatgaccaatccggtaattaatatgcctcctaaagtgcctctgttcagattctccggctggctgcacagaaaaaccagagggataatggcaagaaaagaagcggggaaacaagataggaacggacgttttcccagatggatagcagtgcctgccatgaaatagaaagcattggcaaatgtcagcaaatgaaagatgtaagagaaaagtaaaaggagactgcttgttaccagtaggcggataaatggagtcgaactgagataagtatgcacgaaataataggtggtgccacataatatgaatgtgtgcagataccagtaaggcccaataggatcaagcaatactttgccgagcagaactgaggcactgatttcttttatcccgtcccaaacgggaaatagcatagacatgtaggcataactgatttccataatggtgtatggaatgaatatccatgccatcgctttcagaaaaatttccggctttttatgcacgttaatcagataacccgaaatcaacaggaaggcgggcatatggaaagtatatacgatacttttggcatacggatacttacttcctatatggctcaggtgaaagatgatcatgagtatgataaacaggcatttcagatagtccagttcatggatacggttcctcatgattgtatcagataaaagcatgaggtacagaaaaaattgcgcagatgcggtatcgaaccgatgagacgtagcaatttacgcggtttaaggtgaaatttttgttcgtaatgcggattgataaaccagaattgtttgtgaaaaatctgatagtgggaagtgcagagaagtttttcgaatagttcgatacttgtccggcatttccgtatgtcgagaagttcatcgatgcgtgcctggctttcgccaaagtggtgtaataaactgctgtagatgcctgcgggcaataaatgaatgaaaggcaggcgtgaaacatatttgttccggcaaatctgctgatgccctccaaaaggcatttgccagggagggaagctgataaagagtagtccaccgggagtgaggaagcgtttgatatgttctaaaaggcggtatttttcggagatatgctctataacatcgtgaatcagtatgatgtcgaatgcttcttccaattgtatgatttgaaaaatatccgaggctatgaaagtggcgggcagtctttcttcctggaagaactggcgggcttgccggatgcggttttcggataaatcaatgcctgtaacccggcagccgatgcgggcaaagggtaccagattgccaccttcgccacaaccgatttcaagaatccggctttggggagtgacagaagtgaatcggtgaatgtagggaaggaaatgaagttcactggtcgttgccagttcctgaaagtaagtctttctgttttcgtgtctttgctgcatacgtttggttgtgttttagattcattttcaaagaaaatccttgaaaggaataaagatataaataataattgtatattgagtgaaaagtaactttttttttagttaatatttgcgatttctatatccggcttcatttgattaatggttgaagaatcttgttttggatacagagttagggtgtataaaaagcaaacggacaccggaactgataaagttccggtgtccgctgcattttctatctatacgtctttacttgcgatagctttccaactcttccgccttgaacttacggatgaagttgaaatgcttctctatttcagactcggcatagtttacgtacaccagcgccgacttggcaaacatttcgggagctgttgtcgcatcctgaatcagcaagtgagacattacgcacacggcagccatttcgtaaagacggcgagccacgaagtccagcaattcctgattgccgctttccttaacggcattggtgcaggcttcgaacttattcgtcatttcttttacgcggtccaacagcggttgcatttcctcgctgcacggaatcagctcatagtcgcgcagggtagcggcataagaaccgttggtgacgtagcggatggcggctaccgtctgcaactgtgtagtaccttcgtagatgctggtgatacgtgcatcgcgataaatgcgctgacaggcatattccagcatgaagccggaaccgccgtgaatctggatactgtcgtaagcattctggttggcgtattcggagttcataccttttgccagcggtgtgaaagaatcggccagtttggcatatttcttctgttcctgacgttcttccggagtcagtttgcgttcgcgggcgatgtcgtccagtgccttgtagatgtctacgtagcgtgaagtctggtacagcagggcacggccggcatccagtttggctttcatgatagccagcatatcgtacacggcggggaactcgatgatggctttgccgaactgtttgcggtctttggcataagccagcccttcgttataggcagcctgtgacagacctacggactgagcggcgatacccagacgggcgccgttcatcagcgccattacgtatttaatcaaaccgagcttgcggtcgccgcaaagttcgcacttcgcattcttgtagaccagttcgcaagtgggcgaaccgtggatacccagcttgttttcgatgcggcgcacgtttacacctccgtcacgcttgtcgtagatgaacatggacagaccgcgaccatcctttgttccctcttccgagcgtgccagcacgaggtgcaggtcggcatcgccgttcgtgatgaaacgcttcacgccgttcaggcgccagcagttgttggcttcatcgtaagtggctttcagcatcacgctctgcaggtcggaaccggcatcgggttcggtcaggtccatggacatggtttcaccggcgcagatgcggggaatgaaacggctgtgctggtcttcgttaccgaactcgtaaagagtctcgatacagtcttgcaaagaccagatgttgccaaagccggcatcggcggcagctacgatttccgcgcacatggtgtacggggtaatcgggaagttcagtccgccgaaacggcgcggcatggtcataccgttcagtccggcctttaccatggcgtcgaggttctgtttggtgccgctggcatattccacacggccgttggcgcaatgagggccttcttcgtccacaccttcggcattgggcgcgataatctcacccgtaatctcaccggtgatttcgagcaccttgtcgtaggagtcgattgcatccgcataatcctgcggtgcataatcgaacttgtctttatcttcgtagccacgttctttcagttcgcagatacgctgcatcatcggattgttcaagtgatacttgagttccggaatatctgtataaaaattagccatattgtttttccctttaggagttagcggagttaactccttatttactattctgtttgtaatacttaatcatcttcggaataacctcttctaccgtaccgttgataacgtagtcggcaatggcattgataggagcgttctcgtcattgttcacggagatgatgatgccgctctcctgcattccggcgatgtgctggatttgtcctgagatgccgcaggcgatatagagtttcggacggacggttacacccgtctgacctatctgacggtcgtggtcggcatagcccgcatcgacggcggcgcggctggcgcctacttcggcgtgaagctccttggcgaggtcgaacagcatgtcgaagttctcgcggctgcccatgccgtaaccgccggcaatgacgatgggagcacctttcaagttgtgtttcgccttttctacgtggcggtcgataaccttcactacatagtccgtttcgggaacgtacttggcaacgtcgtggcggattacttcacccttgtagtcggcatccagaatctctttcttcatcacgccctcgcgcacggtcgccatttgcggacggtgttcggggttcacaatcgttgccacgatgttgccgccgaatgcgggacggatttggtacaacagattttcgtaggtcttgccctctttcttatcctcatggttgccgatttcgagtgaggtacagtcggcggtcagtccgctggtcagtgcggaagatacgcgcgggccgaggtcgcggccgataacggttgcacccatcaggcagatttgcggctgttcttccttgaacaggttgatgaggacggaagagtggggaagggaagtgtatggaaacaggcccggagcgtcgaatacgtgcagtttgtcaacgccgaaaggcaatacctgcttttcaatgcctgccagattgctgccggcagcaactgcttccagttggcagcccaactgattagccaatttacgacctttggtcaggagttcgagactgacatcggctaccgtagtgccttctatctccaaatatacaaatacgttattcataatcttatcctatcgtgtggttagctaacagttcaacaatcaaatcttctacatcccggtcgctgcccgtgagcgttttgctttctttggcctggaatgaaatattctgaatggttttcaccttggtgggcgagccgctcagaccgcattgtgcgaggtcgccgttgacgtcggccacactccattccgtgatgttcagataagggtatttctcgtaaagggctgcatacggcagttcggcgccttctttttcaatggcggctttctcctgcgcaccgagggcgcgtttgtatttctgcaccagtttggcattgcgcggacggcagggagcggcgcttccgttaacggtgataacgatgggcagcggaccttccacagtctccacaccgccgtcgatatggcgttttacggtaatctttccggctgctttgtccacattcagaatctcttccgcataagtaacctgcgtcaatcccaacttctcagccacttgcgggcctacctgtgccgtatcgccgtcgatggcctggcggccgccgatgatgatgtcataatcgcctatcttcctgatggcggtggcaagggcgtaggaagtggccagcgtatcggctccggcaaaagcgcggtcggtcagcagatagccgttgtcggcgccgcggtaaagtccttcacggataacttcggctgcgcgtcccggtcccatggtcaggatggttacggtggagcccggatgtgcatctttcagccggagagcttgctcaagggcattcaggtcttcggggttgaagatggcggggagtgccgcgcggttaatggttccgtcggctttcatggcatctttcccaacgttgcgtgtgtcgggaacttgttttgccagtacaacgattttcaaactcatgttattaattattagtattagtattccatacgtcagtaccgggaataggagtagtagagtcctgctactgaaattgtccggttaactatcagcttgcaaatttacgcaaagagttgggtttgacaagaaaacaaggtaaaaaatgcacatccggggagattttgagcaaaaacgcaaaccgtaaaaagggtaacgcaaaccgtaatccgtctaccttccgaatgttctctccggtgtatttttgcagcgtcggacatatcggtaaatcatttttatgctatccgtcgtttttaaataaaccatctatttataaataaagctatgtatatagaaaagattaacgggcctgccgacgtgaagcggctttcggcaggcgaactggaaacattgagtgaagaagtgcgcggcgtattgctgaagaagctgagtgagcacggcggtcatgtaggcccgaatctgggtatggtagaggctaccgttgccttgcactatgtgttcaattcgccggcagacaagattgtctacgacgtttcccaccaaagttatgcacacaaaatactcacagggcgcaaggcggcatttatggacgctgccgcatacgatgaagtgtcgggctacaccgaaccctcggaaagcgaacatgacttcttcgttatcggacatacgtcgacttccgtcagccttgccaccggacttgccaaagcgcgcgacctgaaaggcggtacgggcaatgtgatagccgtaattggcgatggctctttaagcggtggcgaggcttttgaagggttgaacaatgcagccgaactgggaacgaacttcatcgtgattgtgaacgacaaccaaatgtccattgccgaaaatcacggcggtttgtatcgcaacctgcaactgctgcgcgaaaccgacggtcaggcgccttgcaacttctttaccgccatgggactggattatctgtacgtgaaagacggcaataacgtgcaggcattgatagatgctttccgaaaggtgaaagacatcgcccacccggttgcggtacacatcaataccctcaaaggtaaaggctaccgccttgccgagcagcagcaggaacgtttccattacagtgctccgttctgcctggagacgggcagcccggcggttgactccggcaatgaggaagattacggcgaccttacggcaaggtatctgctgcaagagatgaagaaagaccgtaccgttgtcggcatcacagcgggcacacccaccgtattcggctttacgccagagcgtcgcgaagaggcggggcgtcagtttgtcgatgtgggcattgccgaggagcacgccgttgccatggcgtctgccattgccgccggtggcgggaaaccggtattcggggtgtacagcactttcatccagcgcgcctacgaccagttgtcgcaggacctctgcatcaacaacaatcccgcattgattctcgtcttttggggtggcgcttcgacaatgaacgatgtcactcacctttgcctgttcgatattccggtcatcggcaacattccgaacatggtttatctggctcctacttgccgtgaggagtattttgccatgttggagtgggggattcatcagacggagcatcccgtagccattcgtgttcccgccaacggagtcctttcgcgcggcatcgaaccggagaaggattacggcaagctgctgaaccgttatgaagtggcgtaccgtggcgggcaggttgccgttcttgggcttggctctttctttcaattgggcgaagaagtggttggaaagctgaaagaagaaaccggagtggatgcaacactcgtcaatccccgtttcattaccggagtggatgaggctttgctcgaagatttgaaacgcgaccacacgttggtggtaactctcgaagacggtgtgctcgacggtggttttggcgagaagattgcccgctattacggcacatcgggcatgaaagtgctgaactatggcatccgtaaagagtttgcagaccgttatgatgcaggcgagttgctgcgggacaaccggctgacagtgccgcagatcgtggaagatataaaaaaagtaaggtgagaaacgtgggaaacacctgttgtttttcttgtttcataccgtctttttcccgcttgtatatggtgtaaaataccgttcggaacggtgtaaaacttcgtttctcaattgcgggctgtccggtttccggttgcgggccgtgcggttgccaactgcgggctcttcggttgccaattgcaaaacgaagaaaagaaacaggtataacgacattatgtatgaagctttacggcattatatataaggcattgttgtattttgtatcggagataaccggagtgaaatgtggcaaaaaacaaagaaaacaaggcataatcaattttctgtccgtaaatgacaagtatttgtaatacagatagttggtgcggaaggctgcaaaaaaagagtgacgaccgatattcggtcgtcactcttataattttgtcgtcactctctgtatacccgatgaataggggtatgcagggatttggtgatgagtgatgacaactaatgcgtttttctttttctgttccggtttcggaaagatgttatttaatacccagtttcttggcgatgtctttgggcagtgcatccttatgaacaaggatattcatggttttgtaagcaacgaaagctttggaagcataccagatgcctttatacttgccgctcagtccccaggaattctttaccatgaaatattcttttccgttctggtctttggcaatgccgtagataaccatgccgtggtcgtcggttgtttcccagttgtcgaaagcagtctgacgcatttcctgagtaacgttgacttccggcagcggtttgccggtcagctctttgcgcttgtcggcagcggtaaggcctgtccaacgagccatgtccgaaccggtgagttctgcgccgcgggctgcatccggcataacggcaataccgtcgcgggtgaaaccttgttcgctcacgtcactaccccatgcaaaggtgtaaccgttcttaatggcattgtccataacagccatcagctcgtcgataggcaggttccaggaaaggccgttgcgccagttgtcctgaatttcgatggcaaactgggtgtagaacgggtggtgtgtatacgaagtcagcgatacataatcgtccggattgattccgagtgattcgccgaaagtcttcggtgtgtattcttttcctttgtaagtgaacttttcagggcatttgccgaggtaagtgtcgtaaatggcgttcagaccgtttttccatacgggagtcagcttggtgagtctgcctttggcgatggcatctacgtatgcgcctgccacggcatccagttcgttgtgtacaggcagcgaatcaccgtacataatgcccggcatggcttcctgcggcacgagtccgtagttcttcaggcagaacatgatgtcataaaaacttccgcccggtgagaaagaactgtcgccgtgatagcgtacgtagttctgtccgcggtctaccatggtgtggtgtacgacgaacatctcggaaaggtcgtattctcctttgcccatgcgcaacagctcgctttccaggaaaccgaggctggagaagctccagcacgtactggaacggttctggttcttgatggacgtaatcgggttttcttttacggtagtaaagacgaatccctcttctttgggggcgtcttgtgccattgtattcagactgaacagtcctaaggcggcaattaatacagactttttcatcatgattaaattgttattaatttatagttatgtgtgcaaatataaacagaatatcgtaaacaaaagctatctttggtgcgttaattctgacacttatggagaaaataatacatatagacaatcggagcggcctgattctggagggtggaggcatgcgaggcgtattcacctgcggcgtgttggacaatttcatggaccggggcatccgctttccttatacgattggtgtcagcgcgggtgcatgcaacggattgtcgtacatgtcggggcagcggggacgtgccaggtacagcaatatcgacctgctggagaagtataattatatcggactgaaatatctgttgaagaaacgtaacatcatggatttcgacctgttgttccgtgagtttcccgagcatatcctgccgtatgattatgatgcttatttcagttgcccggagcgttttgtcatggtaaccaccaactgcctgaccggagaagccgactattttgaggaaaagaagaacaaggagcgtgtcatcgatattgtgcgcgcttcgagcagtctgccttttgtttgccccgttacgtatgtggataatattccgatgctggacggcggcattgcggacagcattcccctgatgcgtgcccgccgcgacggttacgaccgcaatgtagtggtgcttacgcgtaaccgggggtatcggaaagatattcaagggactaaagtcccatcttttatttataagaaatatcctcacctgcgcgaggctatcaaccggcgcagcagtgtttacaacgaacagttggaactggtggaacggctggaagatgcgggagagattaccgtgatacgtccgcaaaaaccgatagtggtggaccgcatcgaaagggacataagcaagcttaccgacctgtacgaggaagggtatgcgtgtgcggctgctttcagtttctcttctgataatataaaataaacacgtagcgaaaaagtaaatttggacaaagcgtagcgaattagctgatagagcgttcgttacgttttatttttctatgggcagagccaacgaaataccatctcgaagccaagggaaagccgttggagtatgcaggggaactctattcggagggacacggaaggaaattcacgacagaaaaggcagggtttcaagtggtgaaagaccccacggacgggacgagattagttcttgccattgaccgaaagcccattgccgagtggttcaaggaacagttcgagaagttaaggcagaacatacgccgacccatgcagccgcaacataaagggataaaactgtaattaccttattacattgaagtacaaaaagtatcgttcatacaaggcttgtgaatggtacttttcgtatctttgcgaccaaaaaataagactaatacacgttaaaaatggactataaaattattgcttagattatgaaattgattttatcttttgctttgttctgtattgcattctgtttgaacagcaatgcgcaggcggacttttattctttgcaggcactgggagacagatacatctataattccaaatattttaatgaaccacgtgaaattcaagtatatcgaagtggagtaaacgctactttagaaagtgattccttgttaaccatttatgtatttgatgctcaatatccacctacattcaatctgttttgttctaccttcgagttgatatatcccaatgtgccttgtgtcatagttggtgtttccaatcctaataggcagagtgaactgacacctccttataccgattttgattcagtgagcggatatgataatcccggcaaggcagattctttgttattatcattgaaaaacgaagtaattcctttcataaagagtaaatatggtacttcttcacgaattcttttagctgggcattctttaggaggaactttcgtgacatatgctatgcttgttaaccctgatttatttcggtgcattttagctgtttctcctaactatgtgtatagccagcggatgatgattgaccgaattacctgtttcgcagatgaatgtcatgagaactgttcactttatatttatctggcaaatgggaagaaagacaagatggaagaatctttcacccccgaaataaagaaagctgccgatatattttcaaattgttcggagatagttctgaactatgattcattgaacatagaaaaacatagccataccatttttgaaggatattacagagggttgctgaaattggacaactatataaaacaagctaattagtttgaaaagaatatttgcccgattatctaactttaattatgtgtttattaagtacaatttataaaaacagaagagataaaatgcaacttcataataaattgggatattagtaactcatagataaaaatcggaatagcttttttatgatactcgtaaaaatcaccgtagatagttcgtactttcgaaaaaagatgttatatttgtaaatgaaagagttatttgacagcatagcaacgcaaaatgctgaaattcgcacagttgctaaatcgttacctctatttctcaaataattcgttaaaagtttatttatcaattggttaagttaaaccgataaaaatctaaaataagatgtaaaattgccgggattaagaaccgtaataaggaaatttattcgtatctttgcagaagagaaagcggaaaggaaagaaaaaagatatattgtttatctcttttttatccctcaaaaatcagaaatgatacgttttcttttgattttctgtttgttatgaagtcatggggttgactggatttgacagcgggcagaaatggtaagtaagcatgcagtgcgtcgttgatttgcacttaaatctcagtcttcaaaattttatctggcgaaagacaatttgctcttgctgcttaatcgaagtatagtagattagcttaatcccgacacaaggtgttgggacgagacatcactcggaagctgttgctccgaagcattccggtcaagtggtgcagtcaaatcggggatagttcgtgtcagcctcgtggctcggatgaaactttagaggataaggcaacggttgatggctttggttctgccgttgcacgaaaaatcaggcaaagataagcatgtagaaagcttatgatttcctcgtttggacgagggttcgattccctccagctccacagtaaatactgataatcagtaatttaaaagaaatgcacccgattttacacccggtaatgtaaaatcgggtgtttttgtattatttaagaattgggctgtaaaaaaataatgcttgcgaaatgactatactctttttcgcaagcatttattgtaaattgtttgctttacttactatttggactgtgcttttgatgatagtagtctgtattgctactttggtttagctgttgtttcttaataaactagagttggaatcattctataatttcttcctcaccgacgaaaggtagcttcctcagtgaggaagagggcgttcctcaccgaggaacaccccgttggttttaaataaacaaatatattattggtgagaaaaagtgcatatatcaattgaattatgcaatattcttgcctattcttgcatgtttttgcataaatttatgtactatattctctagtttgtgatgtttgaatgaactctttctttgccaaatcttaaaaatggaacattcattgcttaacgtttatcagcgttaagtgagtacgtaaccacacgactgttaggaaggtctgggatatacaacatttcatccactatggtaatatctgccggaccgactaaaggttgagtcagttgaatattcagaggaataatcttttttgtctgacagtcgattgctgctatctgtgccggtgaccaattggtgatatacattgtttttttatccttagacaaagcaattccgtcatattgtccgggagtggtgacaaatttctccggtataggatttgacaaatcagagatttgataaattacatttgcgtctgttgtatttccatctgccggataagatgcaacatacattgtatcattgtctataatcagtccgtttgggccggggatattcacccattctacaggtgttcccacagtttcaggcttactgatatcgagcgcgaatattttgttgctgtttgtcactgaagcatacagtgtgtcgccattggctgccaaatcgtttacaaaaaggttgccttcaggaaagtggatgatttgaggagcttcgtcacgtgcctgtaagttatatacaaccagcttgttgacgtcgcaaataaaaagatagttatcacgtacaaacatccctttcggtgcggaaagattgccgtcagtagaaattaaggtatggacattgccatctttataaaatgagatatatcctttcccttcggtattgagcggattgagttgctctgttccaaagctggctattaacaaaccgtcttgataaggataagtgctttcacaaaaacgaagaccatcggttacgacggcctttaccgattgtgaagactgcgtttcatcttttgactgaggcttttttagttggcaggatgtcattacaaatgcaaagatggtaattgccattgtagagaaaatctgttttttcataactcaacagtgttttttgtttttacttctatttctttgggcaaaaatacgcgtttcataactaaagagtactatctgtttggctcataatgttgcctgttcggcttattgggctttttttcgtatccgatattcggtaggtgtagctccaaactgtattttaaataaccgcgcgaaatgtgaaccggtcacaaatccgctattttcggcaatttcttcaattgtatagtctgttgtgccaagcaggtaggcggcatgtgttaattttttgcttcttatccatgtttgtggtgcttctccgtattcccgggaaaattcgcgtttgaaactagataaacttcttcccgataatcgggctaattctttaattgtgacaggagtatagagatatttgtcgagaacagtggataattcagggttttcgctaagagcagcatcaaataaaaatgaactgataagcttttggtatgggctgtcaagcaagagatatatcaattctaggaatttcagccggatgagttcgaatgtaaaggaactattaccggtactgtatgcggcgagcgaggaaaataatctttctatatcttcattatgaggtataattttgacagctactttgggcgttgaagatagaacggacggataagctgcaaaacgagtgttgagttgttctaccaagtcttgtgctacttttttgctgaaaaagagcataatgctttgaaaaccactctctcctgcaatatattcggacatgacatactcgccgcgcggaatgagaagtaattcaccgggatgaatattgaattgactttgtgctgtttttatctgtttcattcctgtgagtatatagaccaatgcatggtgggtaagaaaagcatcgaagttctcctggccggtagcattgacatactgtaacaaacgaatatttttatcagtagttccgggataaatgatgtcatcgggaacaaaaagtcgttttgttggcatagcgttgaaatgttgtttcttagtgattcgttgtgtagaatgttagtacaaaggtaattatttaaatagaacctcatgcctttattctatataaatttgtaacataacgatatttaagagcctgatagactgctacaataccaaagattttatttacatttgtccttgtaaacaaaatctaagtagaaaacatgagaaaacaactatcagtcacattcgtttgtttcctttttgtttcggctgcgacattcgctcaaagctggaaaccttatgaaaagattgcggaggaaaagacttacaagaaatccgattgcgtgacattattggacagcacgctggtatctgtccaacctaccgggcaaggttcttttgctgtgtgtaaagttatcaaggtacagactccgaaaggagcggtggctaaccggataattaaatatgactatgatccgctaactgcttatgccgaattcaaacatgtaaccatttatcgtgcggatggtcgggtagaagaactcgatgtgaagaaaacttgtgattatgctgctcccgcacgggcgatttattggggagcgagacagataatgcttgaggtaggtgctctgcaccccggtgatatcgtagattacgaaattgccaaaaaaggttttacctatgctttgctcggtgtccacatagagtattttccgcttgttttcgggcagttcagccgtgtagcttagtaccgtcccgtttttcagcgcagccgccacgattgcggagacgttgaacgtcttcttgctcttggcttttccgattgacgcgctgaaattccccagcgtaccgatgacggagcctcgcactttcaggatttcgggtgccttctcgtagtcttccgaaaggtcgagccgtgaggcttgccataggattaccgcctcttcgggcgtgatgtttctttccttgttgtccataccgcacctccctatctgcgtaatggctctgtctatcctcccgcttttcttgatgcggtttgctgtgggtatgctgcacccgaacagccgggctatgccgcctatcccgtacacgtatttcttgtccttgtcggctgctggctgggctggcttcgttccgcttccctgcaaggcatggcggttcaggaatatgaactcttcgcccgtcatctgccatacgggctttgataaaaggtctctaatttccatatcaaaatgaaattaacgtttgtactgcaagccctgtgcatgggctttttacttcgttcgaacagtgcaaagttacttccgggtacgggtggtaaggatgtggatagcgtgatttgaatatcacgctatcttgttaaatatcagtaagtaatagagcgtggtggaaattattttgagtggtaaaagtggtggtatcgtggaatgtcgggacatatcatcgactatcggaatattgaccgcatttcctttgcgaattcctgattgctgtcattgggaaaatcggaaacgggttctttgtattttgacttgtagtatgcgtcgtctattcccagcaggttcatgatgtcctctttccatttctctctgtccggcttgggcagcgtttcactcataaggaaaatgagatagcatacgcgcgccttctccctcggtcttgttttcagtctgccttcgcatggttgcaggttcatgctggcgtagaagtccagttcggaaacggcttcgaactgttcaccgttgcatttctcataaatgactgacaagagtttcatggggaagtaggcgggttggcttgtcggtgtggtggcggtttccttttcctccccctccttttggtcggtcaggtatttttcaaggattgccaatagtgagccgcccagcctgcaaatgtccccgcaacggtttttcaggcattgcagggcttcccgccttgcctgccccttcgcctgtacagttcatccagtttggctttctccttgtcgtattcccgcttgcaccgttcgtaccttttttccagcagttcttcttcctgatggtcatgcttcctgaagcctaccgcttccaaagagccgttggcttccatgagttcccggtaatatccgtttgtgactttcatctgtctgtcgatgtcccagtcaaaacggctttcatgccgtcggcagacgtattcggtatcgagacggtcgaaaaactccctgcaggtgttgtaagtcgagatgttgctctcaatctcccgtttcaggctgttcagtaatatggagaagtgtgctgcgtccatttcaagcatgaggctgatgagtgccgtctcaaaggtctgcgtgtccccgtactgttcgtagaaatcggaaatgaattgctgcttctcaaaagaaaaactaccgccagacattatttcggtatatatcttgttgagtttcccgtagtggggtatcatcgatgttattctttcgtccatagttatatcagattaaatttagtcatagcgttgattttaatctcatctgctatatcaatatagggcttcatcgctttgtaatcgctgtgtcccgtccatttcattactacttgtactggaatgccaagtgccaaagcattacagataaatgttcgtcttccggtgtgagtacttaataatgcgtatttaggtgtaacttcgtctattcgttcatttcctctataatatgtttctcgtattggttcatctatttctgccagttgtcccagttcttttaaaaattcgttcattctttgattgcttacaactggcaatgccttgtcattagggaacggcacacctttgtacttttcgagtattgccttgctgtggtcatttaattcaataataagactgtctgccgtctttatggtaataacttcgatatgaccgtttttaacatcactacgtttcaaattatacacatcggagtgacgtaatccggtgaaacagcaaaatagcaatacatcccttactctttcgaggtatttctttgttggtggtattgggcaggttcttagtttatttatttcattttgggtgaggaatatcacttttttgggtgcactcttcattttaggcgtgaatttatcataagccatgttttggtgatacccttttcgattactccaacgtaagaaccattttacgaatttgatttgtttggcaatggaagtgttgcgcatgtttttttctgtacgcaaaaattctatatagtcattgaaatgtttttccgtccaactgtcaaacgtagtattagggtcaaatgtataaatgtgttttttgactgttgcaaactttttgagggttgaggaagatcagtcattttgtttgctacattctgctacaaattcattgaaaactttcatgaagtctaattcagccttttgcttttcctcatggttttctttcttttccccttttatctttaggttgaacgcttccttaatttgtgcaggggtgggtattacatcttgcacctcgaattctttgaacacattctgtatttcggtgtattgccgcaatagttcggcgttgatttcggatgcactttgctttagcttgttggtacaaccgtttctaacccgttgcttgtctgtgtcccatttttctacatcgattctatatcccgtagtaaattcgatacgctgactggcaaagataacacgcatacggattggcacattctttgtgactggaataccgtcttttttgcggctttccggtgcaaaaatgatatttcttttaatattcataattgggtgtgtttgaaaatgacacccaaaaatacacccgaaaaatgagatatacaatgatattaagagatatttagattaatgaaagaaagagataaataactgattacatgatatttgatattctgtgaaattttataaaaaggttcgagagacaccctccagctccacaaattgaaaagtaaagccgctgtttttcagtggctttactttttgtgtatttaaatacgttctcttttcaaaaaacgttttataatatttcaatctcttctttagataatccggtagcttgtgaaatgacctcaatagccacacctaattttttcaaattacgggcactttcttttactccttctttatgaccttttgccaatcctttattcaacccctcttcaataccttcggccctaccttcagctctaccctcagctctgccctcggccctaccttcggctttgccttcagctcttccttcttcacgttcggtattgatattgtcacgaaggattacaatattatccaagtggcggtaatacgcagcaagctcatccttggtcatgctgtccagtttcaacctctcacgggcctcttccagaccgggagctgtagctgtagaaggtatctccccggtattcaaataataaatccattcttccaaaggactcctggctacctgattgaaatcgtttactttcaggatataatattcgggatataactggctcaccgcatccaccttgaatgtctgcttttggaaaggggtgagttcaagaaggtcattggtgtggatacctctgaactccgtctttccatgataaacgaaatcggtttcatgtcccagagagaaatagacgatattaacgctatagaccttgcggaccttgtcatagctttcccctctattgatatactcggtcaccaatttggaagtgccgaacagcatacgctggaagtaggcgtattcattattgttctgtacctctatcaataccagctcacctttggaattctcggcaagcatgtcgacgcggttatacttgtcatactcgtcctcctgattgctttcgctctcaagaagccgccggataatgatcttttcacccaataacgtagtgagcagaccttccaggacactgaaattagccttgttcctgagcagacgtttcatcgcccagtcaaaacggattatctgattttcgttgctatttttcattatataatatattgattcttacaaagataggcaaaatactttagattacaaaagaatgcagggagataatataatcttcataagcgacaggtatactgttttcttcactgcgtcttgaaattttgtttctgcttatcttttgccgcacattccggacaaagccctttcagtacataattgatgctgttcagcgtaaatccttccggtacttgtactaccggtgtagggatattctggaagcagaatgtcttgttgcaactctcgcaatgaaaatgagtgtgcaggtcgttgacttcgcaagagcagcttgcactgcataccgcatatttaaaagaacctgtcccgtcatcgatgctgtgtatcaggtggtgagaaaggaaaagggtgatggtgcggaagatagaggatttgtcaaccgtatccagcatattttccaaatcgagtaaagagacggagcgtcctgccttgagcatggcctgcaatactaatatgcgtatggcggtgggctgtatctctctctttgccaacaaggctaaataatccttttctttcatatgcttttccctttctattttatcagtttctgtacgcggatggcatttactatggcgataagagccacgccgacatctgcaaagacagcttcccacagggtagccagtccgccggcacctaaagccagtaccaatagtttaactccgaaagccagcgaaatgttctgccatacaatccggcgtgtctgcttgccggcacaaatggctgtagctacttttgagggctggtcggtttgtattacgacatcggcagtctcgatggctgcgtcgctgcccagtccgcccattgcgatacctacatggctgagggcaaggacgggagcatcgttgatgccgtcgcctacaaaggctatccggttggcagtgtttcgtttcagttcctctatgtgctctactttaccgtcgggcagcaggtcgccatacgctcgcgccacccctaacttctctgcaaagttagtgacaattgcctgcttgtctcccgataatatctgaatattattgatatttaaagctttcagctcttctatggctatacaggcatcgtctttcagtgtatcggatagcagcagataacctgcgtaggctgaatctatggcgcagactaccaccgtatcggcaatttcggataattcctgcgggtattccaccttatattcggacaataagcgggtgtttcctgccaagacacgctgtccgtctatccttgcttcgagtccgcggcctgcaatttctgtaacttctgttgctggagacaagagtatatgcctttgctttgcatacccggtgatagctttggctatggggtgtgtactgttttgttccgcagaagctatgacttgaagcagcttctcttcggatatgccttgcggggtatgacaagactgtacttcaaacgttcctttggtcagcgtgcccgtcttgtcgaagaccaccgtattgattctggcaatggcatctaagtaattgccgcctttaaacagtattcccaggcgggatgcggcaccgatgccgccgaaatatcccaaaggaatgcttactaccagggcgcaggggcatgagataaccagaaaaacaagtgcccgatacatccagtcgttaaagataaacgaaaactgcgcgtttgccaatgaatagaggaaagggagcagcacgatcaatgccgccagtccggttacaatcggcgtatagatgcgggcgaatttgcgtatgaacaattcggccggtgctttacgttcggacgcattctgtaccagttccagtatacgtgagagcgcgctcttctcaaaaggccgtgttacttccaccctgataaccttatccgtggaaatcattccggcaaggacttccccgcctttacggatggtgcgcggtatgctttcgcctgtgagtgcggaagtgttgaaggcggcagcttcatccagcatttttccatccaacggaacacgttctccggtttttacttcgatgatgtcgcccgtctgtacgtggcggggagatgtgacaacggcctcattgcctttgatgaccgttgccgtttccggacgtacgtcaatcagtgcgctgatatttcgctttgccttgctcaccgccctttcctgaaatagctctcccagtgagtagaacagcattacggctacgccttccggatactccttgatatagaaagctcctaatgtagcgatggacatcagtgtgaattcactgaaaatgtccttttgcaggatgctttcccatgcctctttcagtacgggtaggcctacaggcaggtatgccgccaggtaccaggcaaacataacagtgtcatctgcgaagaatcccatacctgtagctttcatgatgattccgctgaaaagcagggcggccgaaagcaggattcttccgtattcctttaagaaaccggtgtgttccggttgcttgtctggctgtgcgttaccgtgcgcacaacaacatgtacaattattattttccatattatctcttgtttttgatgcaaaggtagataatagggaatgcaaccaggttgcaaagtcgctctgttgcgggcaatgctcagatttccagcatctttttttctctttccaaatctttttcgttgaacaaaggagaaggaacggagcaggttttgatataatcgcccggctggcaggtatagttataataaggtatctgttcttccgtcagctcttctttggggatgatagtgcctttcagttccaggaagtcgtccatgccggtgctgtccgagtgtttgatgaacagtattcttcgggctatcgggttgcggttgtagtcgagacagaggtaaagccctttgagcatatgcggaaaatcgtacataggcagttgcaggtagattgtgaacagtgccatttgcggtgactcccgttcattgaatatgatgtaggagttctggtggttgctgaaaatacctgttccgaaatgggtggtattgtaggcgctcatgtgtacgactttcacatagccgttgttttcggatgttgtgataagataaggctctactttcagggcattggtcgaagaggaaaggctgtaactgatgtatatgccgctgtagttatatgcgtcttgtacggaacggagcatctcttccgacagcatgtccagaaacggattttctttctgtccggtggcaaccgcaggctccaatgcatacaactgttcttttaactctttcagattgccgagaaggtgttttttcgatacattgttcacttgcgacagggcgtagtccaatgcttcttcttcattattcccttttttaatgcacccgatataggtaggcaatacgcttgagtagagcgaggacagtacacttgccgccatattggtatggtcggctatctctttcatctttacacctttgttgcgcaggtattcaatgcgtctgtatatttcaggcagttcgttcatgtcgttgtgatataatggctctttattcaaaatgtctgcaaagaaagccgtgggatgttatgctttcattacattaatattgcattaatgttacattataaaatgttgatttcatgaatattattaataatgggaattcatttttgctgttaaaataccgccttacttttgctgccggaatcaaaaacaagatagatgtcatgaatgcgataatcggtaaaaaagaactcacagtttccaataagaatttatctgatgccttattcattctttgggcgggtggagctgctttgctctcttattctttggtgtatgcattgcgtaaaccatttacagcggctacgtttgacggactcgattttttcggtatggactataagactgcaaccagcattgtacagatatccggctattttatttccaagctgataggtatcaaggtcatttccgagttgaagaaggaaaaccgcttgaagttcattatcctgtcagtggcggttgccgaactttcccttgtacttttcggagcgcttccgcaaccgttcaatgtatttgccctgtttttcaacgggctttccttagggtgtatgtggggagtgattttcagttttctggaagggcgtcgtgtcacggatttactggcaagtcttatggggttgagcatcgctatcagttcggggaccgcaaagtcgattggactttttgtgatggataatttgcatatcagtgaattctggatgcccgctttcatcggtgcatttgcttttccgctgttgtcgtttctgggatggctgatgacacggatgccgcaacccacgcaagcagataaagaactgcgcacggaaagggttgccctggacagtaaggcacgtttaagtctgttcaagaactttatgcctgtgctggtaatgttgttctttgccaatctgttcgttacggtattgcaggatatcaaggaagattttctggtgaagatactcgatgtcgatgcggcgggactctcgtcatgggcgtttgccaaggtggatgcaacggttacattgataattctgtgtatgttcgggctgatgtccgcagtacggagcaacataaaggtgttgtgtatgctgttggggctggtcacttgcggtacggctacgttgagttttctggctttcaattattctgccttgcaattgcagcccatgacatggctgttccttcaaagcttgtcgctctacacggtctaccttagtttccagacactctttttcgagcgtttcatcgcttgtttcaagataaaagggaatgtgggctttttcattattacactggatttcatcggttatacgggtacagtggtggtgctgatattcaaggagttctttaatcctgctgtcaactggctggacttttacaatctgatgtccggttatgtgggtatagcatgcagtgtagcttttataggttcggcagtttatctgatacagcgttatcgtcgtgagaaatatgcggaagtttccggtgaagaactcgatactccccacccggcgggtggtttatccggtaagcgtgttgcattggaacttcttccggatatggcaaaataaacggatagggaaataactcaaagatataaattatgaagaaaattgaatgtattattatggattgggcaggtacggcagtcgattacggctgtttcgctccggttgccgctttcattgagagttttaatgtgataggcactccggtaacggcagctgaaacgcgtgcccacatgggactgaccaaagtagaggaaatacgcgctttgttcaatatagaccgcgtaagaaacgagtttcaggagaaatacggacgcccgtatgccgaggaagatatattggcgcgctatgcagactttcagcgtgtgttgtttgcctctctggaagattatacaacacctattcccggtgtggttgaaacgatatcgggattgcgtgcacaaggaattaagataggctccactaccggctatacccgtgcgatgatggatgtagtgttgccggctgccgcagcccgcggatatgtggttgataattgtgtcacgcccgacggacttcccgcaggacggcctgctccttatatgatttataagaatatgacggaacttgccgttccttcggtggactgtgttgtgaaggtaggcgacacgattgccgacatcaaagaaggagtgaatgccaaagtgtggacggtgggcgtagtgcttggcagtaacgaactgggtcttaccctggatgaagtgaatgctttgtctgctaccgaactggagctccgcaaacaggatgtccgcaaccgtatgctggctgccggagctcattatacagtagactccattgaagaacttcctgccgtaatagataatattaataactttaaactatcaagaatatgagaccttacattttattgactcccggacctcttactacttccgaaaccgtaaaagaagccatgctcacagattggtgtacatgggatgcggattataatgtgcatatcgtagaggaaatacgcaaatccctcgttgcactcgctacaaagcaaaccgatgaatatacttccgttcttctgcaaggcagtggaacctattgtgtggaagccgttataggaagtaccgttaagccgggtgataaactgctgattttgagcaatggagcttatggtgaccgtatgggaaatatcgctgagtatcacggtatcaactatgatatgctggcctttgacgaaacggagcaggtgtccgtcagctatgtagacgattatctggcacataatgcggagattacgcatgtatcggtggtacattgcgaaaccactaccggcgtgctgaacccgttgaaggagatagcccacatcgtaaagatgcacggaaagaagctgattgtagatgctatgagcagctttggcggagtgcctttggatgtagaggaactgggtattgattttcttatcagcagcgccaataaatgtattcagggtgtaccgggattcggttttatcatcgcccgcaagtcggaactgatgcgctgcaagggtgtttccaaatctctttcgctcgatatttacgatcagtgggaaacgatggaaaaaggacatggaaagtggcgtttcacatcgcctacccatgtggtgagagcctttaaacaggctatggatgaattggctgaagaaggaggggtagaggcacgtcatcaaagatactgtaaaaatcatgaggtattggtagatggtatgcgctcactcggcttcaagactctgttgcctgacgctatacagtctcccgtcataacttctttcctttatccgaatgcggattttgattttaaatcgttctatgcacagctcaaggaaaggggattcgtgatttatcccggcaagatttcgcaggcggacatattccgtattggcaatatcggagatgtgtatccggaggatttcagcaagttgatagaggtaatcaaagaatgtaagtattgatgaacgtttcgggaaaactatggtttctcggacatatattgaggtactctaagtcatattctcagagtacctcagttgtatcctcagggtatcccggttgtaccttcaaggtacttcagccgtgcacttaggcattcccctgcccggaaaacgttgtggggtacaacaattatcgggggagaatcgttgtagacgtaagaaaaaattatatctttgttcgtggtgtcaggtattcatgaagatgttgaacccgattacgaacttaaatgtatctttatgaaacgattcttcctttttgctgccgcggctgtgtgcatggtgcttgcgggatgtaacgggcagcaaggtcataccccgtcttctgttgcgcaggtatcggaacctgccgatactgttgtgcccgtagtggaagtgcctttcagagagaaattgctgacggcagccgatgtgacgcttaccaaagatttgctttacgatacatatacgctggaagatacctatccgtacaaggataccgtgcgttctttcaaatgggatgtaatccgcaattgtctggcttatatagagaatatgcagcgggacagtgtgaagtgggtggtattgcagaattataagaatctgaatcgggaagcccctttggtgcgtaagttcgtgcgtaatgcctatcgccgtgtggcggatacgcttggggtggagcgttatcagtccgttcccttgtatttgccgggagatacgttggtgcccgaacgttatggcagggatgggacgttggcttacctgctgggtgaggaaggcggtttcagccgtattcttcctattacgctggaagatgagtggctggttccccgccgttatttgaagctgctggcggacagcactgtctttaatcatgttattttcgtagaccgtcttgaccagaatatcgctacgttggagcgtatggataaaggtgaatggaaaatccgcagcatgaatcccgcaacgacaggacggcatgcaccgccttatgcacaggaaacgccgctgggcatgtatttactgcaacagaagaaatcgcgcatgatctttctgaaagacggctctgcggcaacgggcggatatgcgccttatgccagccgttttaccaacggagcctatattcatggagtaccggtgaatgttccgcgcacagccatgattgagtatagctggtcgctgggtactacgccgcgttcgcacatgtgtgtgcgaaatgctacttcacatgctaaatttgtatttgactgggcgccgacggagcgttctttagtagttgttatcgaatgattactttctttttaactatctgtatgatagtcgtatgggtggaaagtgctaactttgccgccggtatttttcaggtcggatagttatgttgagattttgcctctcctttttatttatgttttttccctgtttcctgtttttgagaaacagacctgctacctgcatgacggataagccggatgtttcgttggcggcagaatcggcagcatgtgccgatttgtatcgttccatgcaattggaaggggtagtgagttggaaagctttccgccaggcagtaacgggctatcataaaatagcaggccgtaaacgggatgtactgactctgattgatttttcacgtccttctaccgagaagcgtcttttcgtgttcgatatgaagcagcgcaggctgcttttctcatcggtcgtctcgcacggaaaaaacagcggcgacaagtatgccacttcattttccaatgaatacggatcttataaaagttccctgggattctatctgacagaaacaacctatcaaggcaggaacggatattccctcatcctgaacggattggaaaaaggtattaacgaccgtgcccgcgagcgtgccattgtggtacatggagctgcttatgccgatccttcggttgcaagcaggggagggcgtttgggacggagtttcggctgtccggctgttccgcaaaaactcagccgccctattatcgacgccattaaagggggaagcgtgatgtatatctatgccgaggctcccgactatctggctcacagctccgtactgaagaaaacgaccgggttgtaagcgactctttattcacgctccgtgtttttcgtatcttttgatatgtatcaattttcctcagcatttcttttactaattttgcgtcgagtttcggggattagattgtatggcaacatcaagaaaaatgacggaaggacgggctcttccgctcatatttaatttcactttgcctttattgttgggtaatttgctgcaacagacctattcgttggtggacgctgcaattgtcggtaaatttttagggataaatgcactggcttctgtcggcgcgagtacatcagtcatattcctgatactcggtttctgcaacggatgttgcggaggattcggcattccggtggcacagaagttcggagcgagggattatattacaatgcgccgttatgtggcggtcagcttgcaactggctgcggtgatgtcggtggtgcttgccgtggtaacaagcatctgttgtgcagatattttgcgcatgatgcgtacgccggacaatatcttcaccggagcttattattatttgcttgtaacttttataggtgtcccctgtaccttcttctataatttgttgtccagcattatacgtgctttgggtgatagcaagacgccgttctggtttctgctcttttccaccgtcctgaatattctgcttgacttgttttgcatccttgttttggactggggtgtggcgggagcggcaatcgctactgtcttttctcaaggagtatcggcagtgctttgctacatctatatgatgaaacgttttgaaattctgagaactactcctgccgaacgtaaattcgacagtgcgttggcacggacgctgatgtatatcggagtgcctatgggattgcagttttccattaccgctatcggcagtattatgctgcagagtgccaacaatgcgttgggtacggcatgtgtagcggcttttacggctgccatgcgtatcaagatgttctttatgtgtcccttcgagagcttgggtatggcgatggccacttatagcggacaaaactacggtgcaggcaagcccggacgtatatggcagggtgtcaaggcaagcgcgctgatgatgatagtctactgggcgttcacttttgcagtgctgatggttggagccaaaacgtttactctattgtttgtagaggcttcggaagtggaaattctgaaagatgcggcgcttttcctgcatatatctgtctctttcttcccgatacttggtttgctttgtattttgcgttatacaattcagggagtaggttataccaatctggctatgctttcgggtgtttccgaaatgatagcccgtatcctgatcagtttgctggcagttccggcgttcggctatatcgctgtttgcttcggtgacccgactgcctggatttttgcagatttattcctcattcccacttttgcttatgtctaccggcgcatactgcgaatgaacaaaaattagtgtatctttcctctatgaaaagataaagattacccctgtctttatggctcctttacttagtttatggtgttaatgagcatgaatgtattgaccgttctatcaagagcagtcagatatacaatataaaaagtatcattttcctcttcaggctttatttcctaacactggcattctaagccgcttaaagcatcagtcaatttgcaaaacggagtctatgctaccacaaagatactggccttacaataagcggtatattatgagttgccttctgcaatagcttcaggcttcttataatcattgtatggaacaccatcactcaacacgtgccaaatgacaacaagcattttccgcgctatggccactttcactttcatggcattcttccttctgacgacagtttgtgtgtaactgaaattcgagtaaaaacagttttgtgtccggctggctccccatgcgcattcaatcatagtctttctgatgtacttgttaccatgtgtgattcttcgtgatttgatttttcctgcgctttcttcattccgtggtttgagcccgcaccacgacaccaatgcagccgctgtaataaacatcttcatgtcggcccctaattcagagagtatggaggttgccgagcgttcctttacaccgggtatcgtctgaagattatcgaactccctggggaactctttcctgcagatttccgtcagtttttcctggcactctttcagatgcttgtcatccataaggatttcctcccggtactggcgtatcaggtctatgtccacttcattgacaactcctgtcagagcggctgtaattacttcttttccgacacggttcaccgtccgtccatggatggcctccgtcagcttttccgcattgacaattccttcggaaagcaatttcaccacatctttgtagctcttactgtctgtagaagatacgtagttgctgatacggatattgcaacgttgaagcaaggcatccagtttggtcagtttatagaccttctccttgttcaagtcaaaaatgcgtcggttatactgacgcatgcgctgcactatctcatccggcacgaaactgccacggatgagatccttcatggtacattcggctatccaggcagcgtcacggacatcactttttctgccgggaagctgcttgatgaagtaggggttgaccaacttcagacattctatgtcactgagaatgcgccagatgggatgaggttgtgtcaaaatgctgacacagcctttttttatgcgcaaagcccagactttctcaagcccgggctttgttattacccaaagttttcgtatctttaggcataaagtttttcgttatggcaaagttacattttcgtccttacattcccaaccaaaccgttctttttccacaaagaattgatgaaaacatagctgcgaacgacccggttcgcatcgtgaatgctgttattgacaacctcaatcttgagagtttcaagaagctttataaggaaacgggccgttgtccttatcatcctaaaatgatgcttaaggtgataatctacgcctacatgaataatatctattcttgccgtaaaatagagaagcacctccttcgtgacattcattatatttggcttgccggtaatgagcatccggattttatcacgatcaaccgttttcgtaaccgtgtaaaggaggaaataaataatgtatttacccagttggttcttgtccttgccgataaaggcttcatcagccttgatgtggagtatatcgacggtactaagattgaatccaaagccaacaaatatacttttgtctggcgcaagacagtcgaacggaaccgtacgagactaatggataaaatccgtattctcttggagcaggtggatgaaaccattgcacaggagaactctataaaagacacatccgtggagtttacttcctgcaagctctctgacatagtggatgaacttaaagaagccctggaacgccagcctgcaacaaaggataaggaagaaaagaaagctctgcgcaaaaagaagaagcaggtcagggaacttgaagggtatcgtgacaagctgatagaatatgacaatcaccttgatacccttggagaacgtaactcctattccaagaccgatcctggtgccacattcatgcgcatgaaagaagatgccatgaagaacgggcagaccaaacccggatataatctgcaaataggtactgaaaaccaatttatcacagacttctgtctgtttcccaaccctaccgatacactgaccctcataccttttttccactctttccagtaccgctataaccgtttaccgaatatctgcgtggcagactccggttacggttcggaagaaaattaccggttcatgcaggagaatgggatagaagccttcatcaagtacaattacttccataaaaaacagcgtccccgttatactcccaacccgttccatgccgaaagtctccattacaatgagggggaggattattacgtttgtcctatgggacagcacatgaaccgtataggaaccaaacgtgacaagacagcgagtggatacatcaccgaaagtgcccggtataaagcaaaaagatgcgaaggttgccctttgcgtggcagttgttttaaagctcgggggaaccgtattatagaagtcaaccaccgattaaatcaatacaaacggcaggcacgggaaagattgctctcagaagaaggtatcaagcatagaggcaggaggtgtatagaaccagaagctgtgtttggacaaatgaaatacaacatggcatacagaagattccggcatgtgggagaagacaaggttacaatggactttgctttctttgctatagcctttaatatcaaaaaaatgtgtgctaaactgataaaagaaggaaaggggctcattacagttgccaaatatatgtttatgggactatttataacccgatataattggaatatagcaacttgttgccaaatgcatgaggaaaaagtagcatagccaaaagaaaatatagcagaacttaaaatataaatgaggttgtgccaacgttttgacacaacctcgctttccatagtaacttccttaacttcatgagtaaggagaagttgatgcagctcttccagttcaggtgtcaaaacaccgtacttggcttcaaatttctcacctttttcgttgagaatacaaacaaatacactatctttgtgtacgtcaagaccacatactatccgcataggctattacattttgagactaagagctcgtgaaacatttattttgaggctcacacactgagacctccacgccataaagataggggtggtcttgattttttcatatcccactggcatataaatcgtgatttatatctaaatttgtatcggtagttggcaaggtaatgaccgaacgtaagattatacatattgatatggacgctttctatgcttccgtagaacagcgcgacaatccggaactgcgtggcaaacccgtagcggtggggcatgcggaagagcgtggtgtggtggctgctgccagctatgaagcccgtcggttcggggtgcgttcggcaatgtcgtcacagaaggcaaagcggctgtgtccgcagcttatttttattccggggcgtatggacgtctataaatcggtgtcccgtcaaattcatgagatattccatgaatatacggatgttatagaacctatctctttggatgaggcgtttctggatgtgacggaaaataagccgggtattcttctggctgtggatatagccagagaaataaaacggaaagtgcgcgagcggctgagtctggtggcctctgccggagtttcctacaataagtttcttgccaaaatagcatccgattaccgtaaacccgacggtttgtgtaccattcatcccgaccaggctttggattttatagcacatctgccgatagagagtttttggggagtgggtccggtgacggcaaggaagatgcatgttttggggatacataccggcgggcaactgcgtgcctgttcgcaagcgatgctgttgcgcgagtttggtaaggtggggaacatctattatgattttgcgcgcgggatagatcttcgtcctgtagaagcggtgcgcattcgtaagtctgtggggtgtgaacatactttggagaaggatatcaaccggcggtcgtcagtcattatcgagttgtatcatactgcggtggaactggttacccgtctggaacataagaacttccgggggaatacgctgacgctgaaaatcaagtttcacgatttcagccagataacccgcagcgttacgcagtccagggaattgacggcacttgatgtgatcctgccgttggcgaaacaactgttgagggaggttgattacgaacaccatcctatccgtctgataggcctttccgtatccaaccctcgtgaagaaagtgatgaaaaaggtgtttgggagcagctgagttttgaatttagtgactgggaatttgatgaataaaaggcacgttcctgatataaataaattcttattatccgcttaagaccaaaagaatggtatctttgcaatgtagaacgtaaaaatgtaatgaaatgggttgtctgatgaatgttttatggctggtgtttggcggcatactaactgccgtggagtatatgattgccagtttgctgatgatgattacaatcgtcggcattcctttcggtatgcaaacaatgaagatggcggggcttgccctgtggcctttcggcaaagaggtgcgcagcggagagcgttcgggaggctgtctttacatactgatgaatgtattgtggatttttctgggaggaatatggatttgcctttcgcatttgggcttcggcgtattgctgtgtatcaccgtcatcggtattcctttcgggatgcagcatttcaaacttgccgctttggcgttggcacctttcggaaaagatattgtggaatcataacatcctattatcctgtataggcaggaggcttgtaaaagaagagggcaggaaatgaaaatttcccgcccccattcattttatttaaaggtgtaatttacatggtcatggcagcttgctttgcaagcagtttttgcagtttgccgtttaaagtttggcacatagttccgttacccattgcctgatagcgtttgatacggtactgtaacataaaaatttcatttgcattctttttcataatcgtcttctttttttgctttccgcgtttcggaaagcggttgaacatcttttattgttttctctcttattaacgttgcaaagatacaaaatgtttatgagaaatatgttttataacatagaaatctgcgtttttttcttcattttcttgaaaaataccttgttttgccatctgcgtattacaaatatattgcataattctgcaataagaatatatctctttgaactcaagagagttagaagaattaccttgtttttgggtaacgagttggcaaccgttccaattgccgtggtctgcatcgctttgcttgttcggataactcttacggatgcaaaaatacaaaactaaattgagaaaacgccacacttatacatgattttattaagttgaataaacacagagagttattttgcctttattgccgttctcattttgtacctttgcaaaaagaatgagtttatggaaaacattatcagaaaaataagaatgtattatccagtttcagatgaagcgttggaagcattggtgtgtctttttaagagatttgtatttccggaaaaaacaaccatcattcatgctgggaagcaggacaggaaagtctatttcattgaaaaaggcatcacacgttcttttgttttacacaatggaaaacaaataacgacatggttttccaaagaaggagatgccgcttgtggctcatgggacttatatcgcaacaaagctggttttgaatatgtagaaacgttggaagaaactacggcttattctgtctcaatagtgcagttgaatgaattgtatcggtcttacattgaccttgcaaattggatgcgggtgttacagcaagaaaacttccttcgcttgcaagacatacatatccgccgattaaactggtctgcaaaagaacgttatgaacatttgataaaagaatgtcccgaacttttccaaagggtgaacttgggatatatagcttctttcttgggtatcacgcaacaatcgctgagtcgaataagagctaatgggcattttttaacataaggtaaagggaaagttatttcttcttcctaattttgtcaaattaaacaatatgcaaagattatggataagcaagggcaggaataccaatggttggaatgggctaaagagcttcagttcattgcgcaagcgggactgacttatacaaaagacctttttgacaaggagcgttttgagcgcattcgggaaatatcagccgaaataatgagcctgcaaagcaagctccctttgtcggaaataaaagatttgttttgcaatgagacgggttttcagacacccaaactcgatacccgcgcggccatttttaaggataataagattttgttggtagaagaaaatgacggcacttggtccatgcctggcggatgggtagatgtgatggagaccgtcaaatcgaataccgtcaaagaggtgaaagaggaagctgggcttgatgtagacgccgtacgggttatcgccttacatgaccgcaatttgcacaatcagcctccatacgcctacaatgtatgcaaggtgtttgtgctttgcaaggtaaaaggcggatgtttccatccgaatatagaaaccgtcggaagcggttatttcagcttggacgaactgcctccgttgtctgtagacaagaacagttatcagcaaatagaaatgtgttttattgcccgctcggaaaagaactggcaggtggagttcgattaaaaatgcagagattatgaaaacagaatacgagaaatgtttagcgggtgaatctttcattggaggcaaagacccgaagatagtagagacaattttgcgtacaaggcgactgctggcgcagtttaatgccaccgattatgctgatacggagcgcaagcaagccttgttgcgtgaaatgttcggcagcctgggtaaaggtgtgcatgtggatattgatttccattgcgaatacgggaaacatatttttattggcgacaaagtgattatcaacatgaactgcactttcgtggacaacaaccgcattgatatcggcagtaatgtattgattgcttccaatgtacagatatatacagccactcattccaccaaagtcagtgaacgcatggtgcagaattggtcggaaggcgaggaaatatgccgtacatacgctctgcccgtcaagatagaggacggcgtatggattggcggaggcgccatcctattgccgggagtcattatcggcaggaacagtgttatcggggcaggcagcgttgtcacccgttccatccctgccaattgtgtggcggtgggcaatccttgccgtgtaatcaaacagattgaaagtgatgagaaagtataagcatatcatatttgatattgatggtacgctgattgatacggaagaagccatactacaaagcctacaagataccgtgcatgaaatactgcataaagacatcgaaaagtccgaactgagatttgctcttggaataccgggaagcatgactttgcgtacattaggtataacggacacagaacatgccaacagcagatggaatgaacatctgctgaaatacaaatctcgtatcaggctttttgacggcattccgcaactgttgggtaacttgaaaatgaatgactatcagttgggcatagtcacgtccaagacccgaaacgaatacactaccgattttgcagttccttttgcattgtctgattatttttgtactgtgatatgtgtggaagatactcttcgccccaaaccttttccggaacctttgctttcttatctgaacgcatcccacataaatgccgagaatgctatttacataggagataccatttatgacagtcagtgtgcgcaaaaagcaggggttgatttcgggtttgccgcgtggggaaatgcggcaactcaaggagtacaagcagactacctattcaaaagacctgcggatataccgttttccctgataaagagttaacgaataggaaaccgttctctttctccaatccgctttgaaacgcttttcagccctctgcccaacttccgagattttcttctaactacttaaatttcagttcttatttcgttaatctgctgattttcttcgattattccagcgatattgcatatctttgtgtcatacaaccttaataactacgtatatcatgagatacactactttactttccggaataatctgtctgttatgtctgctggctgcttgcggtgactctcatttcatgacggatgcttcttaccgttcgcgtgtggagcgagacttccaacagaaaaaagctttgatgccgcaaggagacttatttgccatattcgaaacctctctcagcgattatgagcgtgaggcgctggaatttctttatgcctacatgcctttggcggatattgcagattattcaggggagtttcatctgatgaatgtgcgcgcttcccggcaggctgccgatgaaatgccgtggggaaagcgtattcccgaagatatattccggcattttgttcttccggtgcgggtgaacaatgagcatttggacagcgcgcgtgtcgtattctacaaggagttgaaggaccgggtaaaaacgctttccctgcaggatgccattctggaggtgaaccactggtgtcatgaaaaagccatttacacaccttccgatgcccgtacaagttcaccgctggcaacggtgcgtaccgcttacggccgttgtggcgaggaatccacatttctggttgccgctctccgttcggtgggcattccggcgcgacaagtatatactccccgttgggcgcataccgatgacaaccatgcgtgggtagaggcatgggcagacggaaaatggtattttctgggagcttgcgaacccgaaccggtacttaatctcggttggttcaacgcgcccgcaagccggggaatgctgatgcatacaaaagtattcggacgctatgagggagcggaagaggtaatgtccgttacccctacctatactgaaatcaatgtgattggcaactacgcacctactgcaaaggcttccgtaaccgtagtggatgccggcggtgttcctgtggatagtgcttgtgtggaattcaagctatacaattatgcggaattttatacggtagctaccaaatacacctctgccagaggcatttgcgggctgacggccggtaaaggggatatgttggtgtgggcatcgaaagacggacatttcggctttgccagactttctttcggcaaacagtcggaactgacggtgaaacttgataaaaaggaaggtgacgcatttgccatagatatggatatcgtaccgccgtcggaaatagccaatctgcctgaggtaaccccggaacagcgtgcggagaacgacagaaggctggcgcaggaagattctatccgcaatgcctatacggcaacgtttatgacggaggatgcggcgcgtgcttttgcccgccggtacaagttggatgaggatgcggttgccggaatattggtagcttcccgcggcaaccacaaggttatctgcgatttcatgacccgccttcgttccgaaaagtcgaagaagggcggtatcgacctgttgcaacggatttcggcaaaagaccttcgggatgtcaggctggaagtactgatagaccatatgttgtccaatgtgcgcaccagtgcggagtatttccgcaagtatgtacgcaatccgcgcgtaagtaatgaaatgctgactccgtacaaggctttcttcaggaaggtggtttcaaaggaagatgcggaagcttatgtagcgcaaccgatgaagctggtggagtgggtagcagggaacatccgcgtggataagcattgcaatttgggaggtgaccccatatctcccgaaggtgtgtggaggacacggttggcagatgcacacagccgcgatattttctttgtatccatggcgcgcagcatgggcatacctgcacgtatagacgaggtgacgggcaaggtgcaactgatgaaagaagagggtgcgctggatgtggatttggactgtaaggatactgtatttatggaggaacttgttccgcagaaaggccggctggttgctggatattcgcctgtcaagtctttggacgatcctaaatattactctcatttcaccctttcgaaagtgactccgcaaggaaggttgcaactgctgtcttacgatgagggcgatctcgatatgggcagcggcactacctggagcagcctgttgaagaaaggtacggtgctggatgccggcgattacctcctggtaaccggaacccgcctggcaagcggaggtgtgctttcccgcctcacggaattcagtatcaatcccggacagaccacccggcttgagttggtgatgcgcgagagtaaggatgaggtgcaggtgataggcagcttcaattcggaatctctctttaccccgcttcaggcggagaattctgagcaaagcctgttggaggcctgcggccggggatattttgtcgttggaatcttgggagtcaatcaggaacctaccaatcatgcgctgcgtgacattgctgctttcaaggccggtttggagaagtggggacgcaagatggtactgcttttcccgaatgaggctcaatataagaaattccgtccggatgaatttccgggcttgccgtctaccattatctacggtatagatacaagcggtattgcagcgcagattgcagaagccatgaaattaagacataaggaaactctgccggtatttatcattgctgatacattcaaccgggtggtgtttgtttcgcaaggctatacgataggcttgggagaacagttgatgaaaacggtggaaggactgtaacgtgggttatatcaaatccggataggagatgtcaaaatacacttaacgatttcttttaggcacggattacgcggaaaacacggatttcacagattttctttattctttttctgtgaaatccgtgttttccgcgtaatccgtgcctaaataaagaaacaaatagtaagcggattttagttttgacacatattctatccggattctggtactatctcattcggttatttgggcgattgtggcttttactctttcttgagttgtcacattccgttcaaattcattgatttgtacggttgcccccatcggtacccgttctttgcggtattgcatacggcttgctacggtttcccttgcagagaaatgaaattcgtggatacccgtttcacgggcaatgtgtgcgatgttgctctcatttactccgcaaccggcgagtaaggtaatgcgtcctgctgcttgcaactggagttctttcaatagaggaatgcccgcttcggcggtgggttgctgaccggaagtcaggatacggtcacatccgagactgataatatcttccaatgccttttgcggattgcggcaaacatcgaaagcccggtggaaagttaccgatatgtcttgggcagcttccataaactgcttcattagaggaatatccacttctccatctgccgtcagacagcctaaaacaataccgtctgcccctaaacggcgggcattgtctatgtcctttagcatgatacgttgctcgataggggaatacaggaaatcaccgctgcgggggcggataataacgtgcaacctggtgttttgcaagacttctctcgctatgacaatatcaccgtaggaaggggttgttcccccttcgggtattccggcgcacaattctacccgattggctccgccggcttgggcggcgatgcaactctctacggagtttgcgcagacttcaaataaatactccttcatggctttggtttttgcgttataccggcaaaaataagaaaactccgcaaactccggaacaatataaaataaaaaaaggagcgaaggtccgataccaacgctcctcttatggttttgattctcttgtttacttagcgtagcttactgcacgcgtttcgcggataacagtaatctttacctgtccgggataggtcatttcatcctgtatcttcttggctatttcgccggaaaggttttccgttgccttatcgtcaatcttgtctgcaccgacgattacgcgcaactcgcgtcctgcctggatagcatatgtcttcgttacgcccggataggacatagccagttgttcgaggtcgttcaagcgtttgatgtaagcctctacgatttcgcggcgtgctcccggacgtgctccggagatggcatcgcatacttgtacgatgggagccagcaggctggtcatctccacttcgtcatggtgagcgccgatggcattgcagatatccggtttttccttgaatttctccgccagtttcataccgtagagtgcgtgcggcaattccggttcttcatcgggcactttaccgatatcgtgcagcaatccggcacgttttgccttcttgggattcaaaccaagttcggatgccatcacagcacagagattggctgtttcgcgggcatgttgcaacaggttctgaccataggaagaacggtatttcatcttaccgatgatacggataagttcgggatgcaggccatggatacccaggtctatggtggtgcgtttaccggtttcgatgatttcttcttccacttgcttgcgtactttggctactacttcctcgatacgtgccgggtggatacgtccgtctgttaccagctggtgcagcgccagacgggcaatttcgcggcgaacagggtcgaaagctgataatacgatagcttccggagtgtcatccacaacgatttccacaccggtagctgcttccagcgcacggatattgcgtccttcacggccgatgatacgtcctttgatttcgtccgattcgatgtggaatacagtaacggaattttcaatggcggtttctgttgccacacgctggatagactgtatgacgatacgtttggcttctttacttgctgtcagtttggcatcatccataatatcattgatataggattgcgcctgtgtcttggcttcttccttcaaggattctaccatacgctctttggcctcttcggcagaaagtcctgagatggcttccagtttctcgatttcctggcgttgcatgtgctccagttcctctttcttcttgtcaacgatggccaattgggcttccaggttctcttttaccgcttctgcttccagttttttgcgttggatttcctcctggcgttggttcagcaccagttcgcgttgtttcaacttgttttccgcttgctgtatcttttggttacggagcgatacttctttctccaaatcggctttcttgttcaggaatttttcctttacttcaagcaacttgttctttttaatcacttctgcttcggtctcggcttctttgaggatgctgtcgtatttggacttcaatccatgcttgaagaacatgtacgaagcaaatccgccaacgatgaaacaggcaatggatactactattgtaactactgtcattttattaatttgttttttaaagtatataaataaaaaacactgcataaaagcctgtccgttgcaggacaaaacttttgtacagtgcgcgacgttatttctttcataaaaaacggacagaaaatcgttttcttactcttccttgaaataagcttccaatacttccgtcagttcttttatcttggctgtatagggctcagtatcattacggtctttcaactgaagggtctccaaagcaaattgataagccaccatagctataatcctctctgaagagatgttctgataatgctcccgatacgcattaatccggatatttacctgcttggcagcttcccttactatttcctcgtcctcacggttgatggtgaggggataggctgctcctgccatttgcaggtttatctttatcttatcgttcatacatcctctttcttttattcattcaacaaagcgatgcatttatcgacttcacgcactaatttggacaatcgcagtttcgtctcttttacgtcactgccgttaaggctgattgtcgtagctgtttttaggttcgtgtagttgttttccagctctttgtaatcggcacgtactttcccgcattcttcttctttagcttgtagaagttgcttaagttcagcattttcgcgttttaattcatcatgcagatagattaaatgccgcagtctggcttcaaaagtacttaatagcttcttttcttcgtctgtcattactacaccaaaattgtacacaaaaatacaattaacttggagattacaaaagcttttcaaggaaaaatgttctgtatgcgttaaaataaggggaaaacaggactgttattaatttatttcatgctgaaattttctcgtccgacgaaggtgtgtcgtaatacacgatgcgccttctttttttcattgactataaaaatcgactcattttttttaagctgcgatattttgaggatttctttgatttatgcgttcgcaacatctaaatagaacaactgtaagctcataaaacggtctaatcagccaatccataccttctttagtcatttttgcacacatcttttttatattgaaggcaatggcaaagaaggcaaagtccatgaagaccttatcctttccaaaatggcggaaacgtttgtaattcatattgtttttcatttgtccgaacacggcttccggttctatgcatctctgtcctctgtgtttcagcccttcctctgagcagagcaactctttggctttttgcttgtattttctgagtctgtgattcaactctatcgttctgttcccctttgctttaaaacatcggcatcttagcggacagccttcacatctgatggctctgtacctggcattttcgctgacatatccggatgcggttttcacatgtctagtccctatcctttgcatcttctgtcccatggggcagatacaaaagtcttgttcttcattgtagtagaagttttccgccttgaacgggtccggtttgaatctcggccgctgttccatgtggaagtagttgtacttgacgtaggcttccataccgttttctgacatgaagcggtaattctcctcagaaccgtagccggaatcggcaaccaccgtatgggccagccggtcatacctgtttgagaaggattgcaggaaaggaatcagggtcagtgtatccgtagggttcgggaagagtgcaaagtcggtaatgaactggttcccggtgccgatctggaggttgtaaccgggctttgtctggccgttacgcatggcatcctccttcattctcatgaaagtagcgtcattgtccgttttggaataggaattcctgtcctgcagcgtgtccagacggttgtcgtattcctgtagcttgtccctgtgctcttccaactccttcagctgtttgcgtttctttttcaacgcagtcttttcctctttcgtggagggttcaggaacctgttcgagtgcttgacgcaattctcctgtcatttcagtcaacatggccggagtgaactcaatctcctcattgctttccgatgagttctcctgggcgatgacattgtctatctgccctagcaggatatgtatcttcttcatcaggcgttcacggttccgctcaaccgttttccgccagacgaaagtatacttattggctttggactcaatctttgtcccgtcaatgtattccacattcaagctgatgaagcctttggaagagagaaggagtacggtttgggtaaacacctcgttgatttcattcttcacccggttgcggaaacggttgatggtgatgaaatccggtttctcatatccggcaagccagatataatggatgtcacggtgaaggagcttttcgattttccggcaggagtagatgttgttcatataggcatacagaatgaccttgagcatcatcctgggatggtaagggctgcgcccgcattccttatacaacttcctgaaactttcaaggttcaggctctcaaccagagcgtcaaccatccgaactggatcatgctctgcaatatcctcgtcaattcttggaggaaaaagcactgtttggttgggattgtaaggacgaaaatgtatctttgtcatagtataaaatgttatgcttaaagatacaaaatctttaggtaataacaaagcccctgcttgtgaaagtcggggctttgtgcataaaaaaagaaggtgcgcattttgacacaccttcgtcggacgagaagtaaacaactgtcggacgattagattttggcagggttggcattagtccgtagttgtatgggtaattgcttcttctatcatttgggataagtttgtgtatatggttgttgaaatgtatataaaataatttattatataatttggtttataaaataaacttattatctttgtatcggagttcgaacccggagttgtaataatgtataataaaaaactggataagactatggaagatagaaaattgaatgagaaagaaagcttggagcttatcactcaaatgattcggaacacacgtcggaatctggatgccggtagtggaaatatgtttttattgtgggggtatgtttgtgtgttgctgactctggttgtttgggccggggtcggtctgacacaaaattctgcatggatgtggggcttttggggaattcccgttgtgggctacctgctgagttatatttttgtgcggagaaaggacaagccggtgagcttgtatatagataaagtattgaatgagctgtggcagtttatgggaatcgtctgtctggcggttgcgttgatggccgcatacttccatgctttcgaagtaatattgcctttgtgtgccatattgctttcgttgggcagtatctttacgggagtcctcattcgttatacccggttttcgggcttgtcgagcatgggcgttctgttgggcttgagaatgttgtttgaggtttgggataagtcctcttttttgcagatattgccggagtttgttctggtggtcatactcgcaatgataataccgggacatattttgaactataaagcgaagaaggaaaacaaaaataagagtaagtgatatgtttaaggaattaaaccctttgcttcacagtgaactgaggcttgccgtaatctcgttgctcatcagtgttgaagaagcggattttgtatatatccgccagcagaccggtgcaacggccggcaacctcagtgtgcaactggataaacttgccaaagcggggtatatagttgtgaccaagacttttaaggggaagatgccctgcacgctttgcaagattaccccgcagggaatagatgcttttgaggaatatgtggaggcgttgaaatcgtatataatgaagtagggatgtgaacccgttagttaagagtctgtttaaattctcttcaagaaatgtttcggacaggatttaaacagactccggaataaaaataagaaaatatgaaaattttggtgacttatgccgttcaaggcgaatttacggaattgaaattccccggtttgataggggaggaagaagtgcaggtgggttatcttcgcaccggaataggaaaggtgaaatctgctttttaccttacggaagcaattaatcgtgcgcagcccgatttggttgtcaatgtgggcacggcaggaactgtccgccatcaggtgggggatatttttgtatgccgtcattttgtagaccgtgatatgcagcggctgaaagggtttgatatggaatgcgagatagactcggcggcactgttggcgcaaaaaggatattgcctgcattggcagcgagaaggagtgtgcaatacgggtgatactttcctgacggaactgtcggatgtaaaaggcgatgtggtggatatggaggcttatgcccaggcatgggtgtgccgtaccaagaacacgccgttcatcgccgtgaagtatgtgacggacattatcgggcagaattcggtgaagcactgggaagataaactggcggatgcccgtaaaggactgggagcgtttttcgaatctatttcagtgttttgaaagagaggatgtggtagcttgttcctgctgcaatcagcaacaacactgcctttagccaccagtaggggactatgaaaaagatacagttgaggatggttatccatatcagcgagaccgagatgattttggctcttagcgggatggctttattttcacggaagttacggatgtagcttcccaggtatttatggtgcagcagccggttgtaaaggcggggagaactgcgtacataaagggcggctgtgagcagcagaaacggagtagtaggcagtaacggcaggaaaataccgatgatgccgagtgccagagaaagtgtaccgaacagaatataaaggactttcatgtcgcaaaaatacataaaaagatgaataataaaattgtttgggattgtttattgttcatatgtacagggaaatatgttttctgcctgcaaccggagtctttgtggacatcaggcagccgcgcagtgtcgtagtgttcactgtatgtatgaataagcgtcaatctcgtgtgtaaattctaagttttttgtacttttgctgccgcatcgaggtgacattagatgcacggttttataaaatgatattttaaccagcgtattaacagtatgtacacagtcattaaacgaatggaggtttcggctgcacacagtctgaatctttcttatcagagtaaatgtgagaatctgcatggtcacaattggataatcacagtctattgccgtgccaaagaactgaatgccgacgggatggtggttgatttcagccacatcaaacaggcggtgaaagaaaaactggatcaccggaacatcaatgaagtccttccctttaatccgacagccgagaatatggcacgctggatatgcaaccagatacctgcctgctttaaagtggaagtgcaggaatccgagtcgaatatagccatctatgaggaggattgacaggagcgcttatgaggaagattaacgaaatattttacagcttgcaaggagagggctttcatacgggtactccggctgtttttgtgcgtttctccggttgcaacctgaaatgttctttttgcgatacacagcatgaagagggtgtgtggatgtccgatgaggaaatcttggcggaagtgggaaaatatcctgcggtgacggtgatactgacgggcggagagccttcgctctggattgaccgtgaatttgtggactgcctgcaccggatggggaagtatgtctgtatcgaaacgaacggtacgcattccttgccggataatatagactgggtgacttgctcgcccaagcaaggtgcaaaattgtgcatttcccgtatggatgaggtgaaggtagtgtacgaaggacaggatattgccgtatatgaatcgcttcctgccggacactttttcctgcaaccctgttcttgcagcaatactgcggaaactgtggcttgcgtgatgcagcatccgaaatggcggctgagcttgcagacgcacaaactgatagaaataaaataagaccttgtaattttttaaatttacaaggtcttatcattgcacgggaggagaggctcgaactcccgacacccggttttggagaccggtgctctaccaactgagctactcccgtgtttgcggctgcaaaggtaatggaaactttcaaatctgcaagttctttgttgctttattttcttaaaaaatggcttataacatttgtaggtcctgatacataatgcgataggctgccgcttttttttctaaagccagcggataagctcttgatgaagagggcatgcggtagagccgcatagggcggtctgcgaaaatgaattctgtaaaatcgccgactttaggttcttgcaatgagaacagcgcacagagcgtgtcggtagctttttgtcccgtagtgacaatcgctttgcactgtggcagttgttgcaataatgcggatatgtcggtgggtcggaccacttcgaggtacttatcggatgcattgtcttgcaaccgccttacggcagtggccgtatcgaacagggctatccctttttcgttcaggaaatcgatgatacgctccttgcggaaagctttttgggatttgtcggcaaaatggtctttatcattgaagaataaaagacctgcaatacgccacatgtcattattccagttcgggtagtaaaactccatggaccagcgttttctttgcggcgggaaactccccagcatcagcaaacgtgcattgccgggaaggaaaggttctaaaggatgctgttctatttccataagattgattttgcttatacattagcggatgataaggcaaagttaatcaaaaatagtttttcagcagctttcaagtcccagattactcattttttctgtaatccggaaagggaaatccggatattcgtacaagctgaaccggggttcggtttttccttccgtatagttccagatggaagcatagtcttccgtgtcctctcccatggcttgcagttgtcgcagataggcggctatggatttgctttcgacaatgtatactgctccgatactgtctataataggactatggcgacgtgtaccgtcgtgttcgaaacgaaggatacgctttccttccggagtgattcctaccattttgaaagtcatgctttttccgatggcaggcaggttcagcacattccggtctgtggcgaggaacggcaggcgatgtgctttcgtaaaacggcggatacaggcggcagggtcgtgtgtccgttccaacagtacggagaggttatgggcatcttctttggtaagttttccgaatgctttttcttcctgctcttcttgtatggagcggctgtttggagtgaaaacggcattattttcttcaaatcctttcaccgagaatgtgtagtaacagattatgcccagtttatttaatacctgtcgcaggcgtgcagtgtgcccccggcgggatgcggctacattatacaccagctggttggtgatgagccatcctgccgagagcagtttgcgaatgccttcctctgcttcgggagtaacttccagcggggtttggaaatgtgtctggatgataaactgacgtatgccgaccgtggatgccttttccttgaattcacgcaatatgtccactaattcgtcattgatgcgcatcggtaggtaggcgggcaggcgcgaaccgaggcggatgcgttgcaattcggcgtatttctcaccttccgggcgttcctggttggcttttcgcttgcgcaccgccatacggtaaacggcgtccaatatgttgcgcaaggttttgttctggctcataagggcatcgccgccggtaatgaggatgtcacgcaattgcgtgtcttcttcgaaataggtcatgaggcggcgcaatttcttatcccagctttctttgggatgcagttcttcaaattcaaagttgaggcgtttgctttggaaatcgtacatacgctggcaggaagcgcaaagtccgccgcaggctctccccatggtatcggggataagaatggctacctcaggatagcgtctgtggatattgtgaccgtcgggcaataaccagcctgcagcgttcggcttgccggcttctacaatgtcttcgcgttcccaggcgcggatttgtccgtaggtctccaccaattggggcgagtagaggatatagctgcgtaaagagtcgtcgttatagccgcttccggtacagttcaataaggaaaggtagtagggggtggcgaagaacggcatgccttttttacgtgcacgcgacaataaatacatggtttccacggaaagtgaattgcccaggaaacggttcagttccgtagggcttttcactgccattgcaaggtggaagcggaaatcgttccaccattcgctgacgagccggaatttttcttcatagctgatgccttctgcaaaatgaaagcgtgaagcagaattcttgcggttttctattttctgtataagggcatgcaggatacgttctttgttgtatgcccggagttgttgcacatcctcatccagtccggaaagccaccgttcactccaggcttttacgcgttggaagccgggtaggggatgttcggggtgttgcagacgtttgaattgtcggaataaatcaatgaaaaggtcagtttcgaggtattcttccagtttgccggtgaggaaatcatagagtaaggagagggttgaaacaggcagttgcttgtccgttgagagctcatgtactttttgtccgttataatcaatcagaagtcgaatcagcttgccggcctcactttccgcttggggatgtcccgccatatactccgacagatatgttttgaaagtctgtgcatctccgcttcgggcggcgatgccggtcagttcggggagttcgtgccggtaaagttgtttcagttgtgagagagtgagtgcaagcattttcttttgtttcatacgcaattcttttttagagattaataatcggtgattggcgcaggatgcgctttcaatattccgtgaggggaaaaacggtctgataaatataacaaaaaaaggcggggtataaaaacctcgcctttcgtcttatgaaatattttagatttctttttgttttgctaacaaacgcttttctgcctatttgtcaaaactttagcttatgctttttcttgttcgtcacctttctttttcggttctttctttgccagcatgactatgttgtatacatactctgtcatccattgttccgagtatcctaaccgctctttgtattggcggactgtcatagcggtcttgtgcacatcgttctttttccacacggtcttggtgcaaacctcatgtactgttttttcggtcatgctgcgtaatgcgcctttgaagatggaaggcatacggaatttccattgcatcaagttgcccattaacatcatcaggtcgttggagaatccctgatacatgaaaagataggcttgtacatcgttctgtgtacggcagtgcttttttacggatgcgtcaatctctttaaagaagctttcgctgatgccgtaatcctgcatcagcatcttgcgggaagccgctttttccgcttgtcccagacgtccgccttgtgtggggattttgaataaacgtttgaagttggctacatccggcacaaaacggatgttggtgatgcccaggttggcggctatcacggactggaaatagacgcgtgtcaatgaaacgaagtcctccacatttctggaagaaacctcttccgaattcttgttgaatagtttggcaaatatacccatgatgataatttttctgatttatgggcgcaaaggtagtaaataacttgctttttaccagcactccaactctttatttcagcttgaagtgaaacttatgcccttcgaatacgggttccacaatgtcataacggatgagtttggcaagcagatgctctgcagcacggcgtgacagacgtgccagacggcaataacggttcagtgacaaccggtcgttttgttccagtaaatcaagcagtagctgctcccgttcggtatattccatcaattctccttggggactttcgctttgttgccagatacgcagatgtaccggggtggcaagtatgttctcgtccttgatgcgcaaataggcaagatatttgccggcttcgtccttggcatataccggtttgcggtcgctttcatcgatttgcacaagtaatacgctgcggccttctacctgataggtctgtgtgctgtaactcacttccggccggcagtataaccgggctgctgcctctatcatatattgttcttcatcggaacgcactccggcaatcttaccattatcctttacgccgatgagaagccgtccgccgtccgtatttgaaaaggcagaaagcgtcttggcaatttttcgcgcatcagatatttcgaacttaaaatcttgttgttggtgctctccttcggctatgagagcatgtatatattgggtatcagtaagcgttttcatgtctgcaaaaatagataaaaaacacgtataagcctttttaaatgccgattttgcgtattatttcaaaaaaaatatcgtttttctgcatttatttcaagaaagaatgtatttttgtcggacattattaacgaagtaattaaaaaaggattatgaaagaattagttgaaaaagttgcagaattgtatgcagcattcgaaaaagatgcaaaagctcagttggaaaacggtaacaaggcagccggtactcgtgcacgtaaggcttctttggaaatcgaaaagacaatgaaagaattccgcaaagcatctttggaagattctaaaaagtaagagaaaacgcagatttaatgctgtgaaagactgccgttcggcggtcttttttattttatgcataatggctgttttgtataaataagtcgtatttttatgatattcctcaacgattttaatatattaattgcttggccttttgcttttaaatagaagttttattattacttttggcacagggtatgaacgaaaatgtactaaataagttgaagatattggcagagtcggcaaagtacgatgtctcttgctcgtccagtggcactgtacgttccaacaaggcaggtatgctgggcaatactgtgggcggatggggcatctgccacagctttgcagaagacgggcggtgcatttcgttgctgaaggtgatgctgacaaactattgcatatacgattgcgcttattgcattaaccgtcgcagtaatgatttgcctcgtgccactctttccgtcagcgaacttgtggacctgacaatggagttctaccgccgcaattatattgaaggcctttttctgagtagcggagtggtgcgcaatcccgattatacgatggaacggttggtgcgtgtagccaaagaccttcgtactatccatcgtttcaacggttatatccatttgaagagcattcccggagccagtcgtgagttggtgaatgaggcggggttgtatgccgaccgtctgagtgtcaatgtggaaattcccaaagaagaaaacctcaggctgcttgctccggaaaaagaccatgaaagcgtatttgctccgatgcgttatattcagcaaggtgttttggagagtgcggaagagcgcaggaaataccgctatgcaccccgttttgccccggcaggacagagcacgcagatgattgtaggtgctactgccgagacggacaaggatattctttttctttcatcggctctttatcagcgtcctacgatgcggcgcgtctattattccggatatatctcggtgaacacgtacgacaagcgtctgccggctttgaaacagccgcctttggtgcgtgagaaccggctctatcaggcagactggctgctacgtttctaccagttcaaagtagatgagattgtggatgacgcttatccggatttggatctggagatagacccgaagctgtcgtgggcgttgcggcatcccgaacagtttcccgttgacgtcaataaggcggattatgagatgatactccgtgtaccgggtatcggtgtgaaatcggctcgtctgatagtcgcttcccgccgtttctccaaattgggattctatcaactgaagaagatcggtgtggtgatgaagaaggcgcagtactttattacgtgcagtgaactgccagtacgcacggtcaatgaaatgactccgcagagagtacgtaacttgctggtgcagaaacccagaaagaaatatgacgacaggcagctgattcttgattttggagacgaagaaaatgactctgtttatattcgataatacatttgagggattgctgacttctgtttttgaagcctattcccgtcgtacttttccgggtgctttgctggcggaaggggagccgtttcctctgttctatgacgaggcttttactgtagtatcggatgaagagaaagcggggagggtttggcgtggcttgcagaaaaaactttctgcatccgccttgtcttgtcttacgcagtgctggttggcggaagagccggaaactgcatcgcttttgttccgttatatccgcaaggcaatagatgcttcccgttccattgaaacgaactttgcagaccctgatgttttggaattttcgcgtatgtggaagcgggtggattgggaacggatacggatgttacagtttgtccgttttcagaaagcagcagatggtacttattttgcggcggtagaaccggagaagaatgtacttcccttgataaccgggcattttaaagaccgttttgccgaccaatgttggttgatatacgacatcaagcgtgcttatggttattattacgatttaaaagaggtgcggaacgttgtttttggggaagatagccgggaaggacatcttgtgacaggaatactggatgagagccttatggataaggatgaaaagctctttcagcaactttggaaaacttatttcaaggcaatctgtatcaaggaaaggctgaatccccgcaagcacaggcaagacatgcctgtgcgatattggaagtatttgaccgagaagcagacttagtatttagtttattacccagttcttgttgtgcggaacagttttatgcgggttatagtgcattccggcttgtgtcggtatcttcagaatgtatgtacgtccgcttttgttcattagtgaagtgtcgcgcagccagggattggcatctttcagctgggcataagtgattcctttatctttggcgaattgtgccagattggctattcccgtggtgactttcacttcggtgtaagggatagccggatataggtgttcacgtttcatcaaaaaaccgtattgttgcgggttgctgataacagcttttgctgccagcaaacggaacatataacgtgaggtttcttctaccagccaaaggtctgccgcctgactcaccatttgcttttgtaactgtgtggagatacgtccctgaccggcattgtaggcagcagccacgcaaagccagttattgtatttggcataggcttcgttcagatatttacaagctgctttcgtctctttttccacatgatagcgttcgtcgatgttattgtttacttccagaccgaactcgcgccctgtaccgggcatgaactgccacattccggcagcgccggcgggcgatttggcaagtgggttaagtgcgctttctataacggcaaggtatttgaaatcatccggtatgccatttgcctttagtataggttctataataggaaaataacggttggcacgctttatggtgagcattgtggtagaatgcatataagtaaacgacatcagttcacggtccatgcgctcgcggtggtcgtagcgtaacaagtctacttcctgtccggcaaaggcaatcttggcgggtacggtaggagaggtgacgcagtaaggtatttccgatttaaccgactgtctttcaggattcagtacactgctgccaaggagaaaaggcagcgaagtgcctatgcacaaggaggcagtgactgtgagtatcatatatccggactttcttttcatcttggttgtttttgctttttgggcgtgaagatacgaaatcaattctttatcggcaaccgttcccacagccaacgtggaatcattcgccagaagaataccaatagacgatagcgtccgtcaattactgtcactcgttttttgtgtttcaacgcccggacgatatattccgccactttatcggcatgcatcagcatcggatacttgccgtttcgcagtaaatccgttgctacgaaccccggacggatgtcggtgaagcggatattaagatgctgcatccgtgcgagttgtgccaaagcatcgatgtatgtattctgaaaccgtttggtggcggagtaggcaggtgcgactcccaatcccttggtacctgctatggaactgattacagcgatatgtccgttttttgtctttttgaaataatcgaaagctgcggttaccattcggataaagccttcgacattggtacgtgcggtattcagttctatttcaggttctaggttcctgttctgaaaacctacgccggagctgaggaaaaataaatccatgccgcctaagcggtctatcagttctgtaaggtgtaagacggcattttcctttgtcacatcaagatgctgtatctctatctgttggggattggcttgctgcatgcttcgcaggacttctttgcgtctgccggcaatgcctatgcgccagccttgttgcacgagtattccggctacttcctgtccgatgcctgaggtggctcctatgatgatagcttttttcatgggaagagattatccgataatggttgctacgatttttcttcctccgccacggttgcggaattcacaaagataaataccctgccagatgcccatattcatccgtccattggtgatggggatggtcagttctgctcctacaatggtagatttggcatgcgccggcatatcgtcgtcaccctcgcaggtatgttcgtagtaaggctcacgctccttgacaaggttgttgaagatagcttccatatctgtctgtacatccggatcggcgttctcgttgatggttagtgcggcacttgtgtgtttgataaacaagtgcaatagtccggtcggaggcaactgtggtaagttacgtactatttcttccgtaatcagatggaacccgcgtcgatggggggtaagggtaaattctttttgtataatcatattttctattctttattccattggccgtacttggcaaggaaacactactgtgaacgtgctacctttatttacggtggaggttacttcgattgttccgttcatatgttccatgatagacctgcagataggcaagcccaatccggctccctgaatgaaagcatcagctttttcgaaccgttcaaatattatgccgagcttttcctcagggattccgcgccctgtgtcggaaacgcttattcttgtttcggacggtgtcgtctcgtacgaaatttcgacatagccctgtacggtatttttcagtgcgttcgatatgaggttgctcaaaacctgcttgatgcgcatcggatcttgctttatcaggttaggagttgccgggtagcgtttcttgagcgttacgccttcaggtacgttgggctggcattcggtgcaactttcatctatcaggtcggagaggttgcaccagaccggggacaactctatgtgtccggcttctatcttcgataaatccagtacatcgttgatgatgttcagcagcaattcgttgttgtggtttatcagggagatgtaatggttgcgttcctcagcatcttctatatggggcaggaggctggaaaagccgataatagcattcagcggtgtacgtatttcgtgactcatgttggcaagaaaggccgatttcaggcggtctgactcttcggctttttctttggcatctatcagcatggcttccgtggctttgagccgggtaatgtcgtagttgatacagattagttcgatactgttccgttcgggagcgtaggttttcactatcaggttgacatgtgtccaagtgtagctgctgtcttctctgagaacacgtacttctttattgaacttgtcttccataccttttgctgcattgttcaggaaaccgagcatggcgcgccggtcttcgggatggatatgtctgtacactccgatgattcgggacagaggagttccttcttgttcgccgatattgatgtaccagctgtgttgggcatctccttgccgggtgagtaagtcgtagtgtgcgtatcctactttggcatagttacctatcagttcgaagaaactttcgaattcctgtatcttgttgtaggctacggtggtttcggtcttatcggcattaatcaacaggtagttggcgggggtgtggttctcgtcgtacagcgtggttactttagttacgaggtctattgtaccggtcctgatttgcggattgtagtaagaacctactttcgagaagtcgtagcggaatgtgaaatcggcgtcttcatattttttcagtttctctttcatctctttcgggaagatagggttatcaaatatattgatacccagcaagtcttcttttcgttgcagatgaaacatttccaattccttatcgttgaggtctgtcaatactccgtctgtattgtagacttcaatgcctaccggaagatgcttatagatgttgtgcaagagttgttcgcgttgtcgcaacatctgtgtggcggacgacatataaggagcgtcctgtatttcggctatgccgtaaatcttggtctttccgttttcatcggttttttgcatacagattttgctgcggacccatgtcggtcctttgacggtatcaagcagatagacggtttcattcgtctgttgtatgttgtcgaaggaacggacggtagtatgcggctgttcctctctcagtatgcgcttgttgaaattttcaaaactgatacaaccgccttcttccaatcctaacaggctggcgatgggaccgtagtatatataatcggcatcttgtatatcggctttccaccagcctatattggcattgtgcattatttctgacagcaggttgtaatccttttcagcgtccatacatggatgtttagggttgtttatattatatgcgcatacaaaaatagatataattcgcagaaatggaaagaaatagggagcggatgttttattaaaagtggtacaataatgattttgttgaacttatctttgtcttggcctgcgaaaccgtgatgccagttattgataagagagcgtgaatttgcatgctattttgaagaatgatacgggtaataatgagagtaattaccgtaacaacaaccggaaaaatatggctttttaatgattcgcttgtaatttattcggagataagcggtatctttgttaccgtttacaacgcatttacccaacaaaacaaaaaatatatggaaaaagttattatcaattcgtacgaggattttgaaaagctggtaggtcagcaaatcggtgtttcggagtatgtggaacttacgcaggaacgcatcaatctctttgccgacgcaacgctggaccatcagtggattcacattgacacagaacgtgccaagaccgaaagtccttttaagagtaccattgcacacggttatctcaccctctccatgttgcctcatctgtggaatcagattatcgaggtaaataacctgaagatgatgattaactacggaatggataagatgaagttcggtcaggctgtactttccggacagagcatccgtctggtggcttctctgcattcgttggcaaacctgcgcggtgtggcaaaggcggaaataaagtttgccattgagattcagggcgagaagaagaaagcgcttgaaggtattgctgtatttttatattatttcaactgattatgcgcaaaatggtgtgcccccaatgcaaggtgggggcattttatgtcttgaacgggcagggagagcgtttgcccgtatatgtgtcggacaaaggcgaggtcgtaccgaaagatccggcagcttctttaaaagggtatgacctggaagaggtttactgcttatgctgttcctggcacgggactccgaaacgtctggtgaaatattgatatatacgctctttccataaatgcctgcacgctgcgaccggatgatagagcagcatgcgcggtccggcatatcgcatgacttcctgcatccgcttcttcatctccggcttgtagcaatgtaccgggcatagtctgcaagttgttttattctctccgaacgggcagcgcgacaggcgcgttcgtgcgtactccagcaattcgagacattgcgggcagagttccttgttgccttctttcctgcggcaatagaggcggatcatctgttctacggtgcgttgttcttgggcaatgtgtgattggcaggtcttattcatccatattgtgtttcaggtaaaccatatctttcagttgtttgcccgcttcataaatgggatggtcgtagttatccgtaaagaagtccgggatgcggtgggaataggtaaatccgcagttctcgtaaaaaggaatcgccaatgggctgtctccggttcctacgagcattgtccggcatctgcctgcataatgtccgaaaagatactgtatcagtttcttcccatatccccgacgttggaattgcggataaacggcaatgttctttatctcaaaaacatcttctgcttcgcgggtgacgacacaggatgctctgatactgccgtcctcggacaacacgaacatttcaccgcgttccagataacggtctatcatggattcttgttcatcggccaaaagcagcaggtcgaggtattgtttcttattatggagcacaggctgtatacttatcatttcattgctgtttgaacgggtttgtatggcaaagataatccttatgggcatagaaccaaacaaaacaccaggaaatattgttgatttccaacatggaatagattaatggttatggataaaatgaagtctttgttcttttttttgacgctttggacatttttgccactttttgcaggctatgctcctgataatgtgcaaactgccctgacgaaaatgtatccttccgccaaagggatagcctggtcgcaggacgaggagtattacgttgcggattttatgatgaacggatttgataccaaggtctggttcaatacggatgcagagtgggtaatgaagcaaacggattgggaaaccctggatgaggtgcctgccgccgtattcaacgcttttgcagccagtcagttttcggacggggtggtacagaatgttgtttgggtgcaatttcccaaatggcaacctattgtagccatacaggtgggcaggccgaacgtgcagataaaatatcagatattgtttactccgaacggtgaagttctccgccagcagaatatcacttacgcttacaatacgcttggggcaagtactttcctgtaatcagacgtgagatgcccggctgtcggtaggcatcttatttccgtcgcttggtataaaaaacaaggctgtgtattttttatactctctgtttacgctatctttgccgcaaagaaagactttatcttatgaatcggactacttttctgcaagatgtttacagtgttgttgccgctattcctgaaggatgcgttgtaacctacgggcagattgccagtttggtaggcagacctcagtgctcgcgtatggtggggcaggctatgcacaacgtaccggaggaattgcatttaccttgtcatagggttgtaaacagccggggcagattagtgccgggttggacggagcaaagagtattgttggagaatgaaggtgtccggtttaagacaaacggttttgtagatatgaaaaagtctcaatgggaatttatgaaagaacaataaactaacgaataataatcgaaatatgaaatttataggtgcacatgtatctgccggcggcggtgtggagctggctcccgtcaatgcccatggaataggagcgaatgcttttgccctgtttaccaagaatcagcgtcagtgggtggcgaagcccctgacgcaggaaagtattgccttgtttaaggagaattgcaggaaatatgctttggaggcacgttatattcttccacacgacagttatctgataaatctgggacatcccgaagaagaagggttggagaagagccgtgcggcttttctggatgagatgcgacgttgtgaggaactggggctggaactgctgaatttccatccgggcagccatttaaataaaatttcggttgaggcttgcctggacagggttgccgaatcgattaatgttaccttaggcaagacgcaaggcgtaacggcggtcattgaaaatacggcaggacagggcagcaatgtaggcaatgagttttggcaactgaaacatatcatcgaccgtgtggaagacaagtcgcgtgtaggtgtctgccttgatacgtgccatacgtatacggcgggttatgatatcgtaaatgaatacgacaaggttttcgacgaattcgataagaccgttggcttcggttttctgcgcgccatacacttgaacgattcgaaaaaagcgttgggtagccgtgtagaccgtcacgacagtatcggcaaggggcttatcggcttggatttcttcaaacgttttatgaaagacgagcgttttaacgatatgccggtgatactcgaaactccggatgaaacgctttgggcggaagaaatcagcatgctgcgtagttttgaataattgtccggaaataaatgacgcggactttcgtggatgttattaattgtatccacgaaagtccgcgttatttgtgcccgaattatacgataatgaagtttattcgtttctcgtgatgcgtttgctgcctgctacctgcattattggttgaccttaacgtccttccattcaaaattagagataatctctttgtcgcattgggcattctttgccttgatattcaaattctcgaaagtgaaatccttcaattcgtattggtcggactttctgacgttgaagaatatgtcgcagctcaggctgatattgcgcagcgtcacgttgttggcacgtgagagggggatgtccttgcggcctttgaggtcgaagaactgtgtccacggtttgatgagcagcatgctcttggcatcgcctgtgatgtcttccaccaggatgtattcgtagtgttgcggcgtatcgggacgcatcttcagccacaacaggcgcgtggcattgctgattttgcagcggcggagaatgatgttgcggttgtgtatcgactcgctgccgcatgtcagaccgctgtggcaaaagccgtacgtgcagtcttctatgataatgttggtgttgctgccgttattagggtccttatccgcccacgggcctttgccgcctttcagtgccacggcatcgtcgttgacggacatatagcagtttttcaccagtacattgctgcagacgtcaatatctatcgcatcgctgctcggtgctttcaccggggcggcaggagcgaaaatatggagattcagcagctttatgttattgcagcggtagatatgcgtagtccagaacggagagttcataaggcgtactccggagatttgcacatcgttactgttggagatgtaaaccaggcgggggcgcaactcgtccatattggtacatttcgggataacctgccggcgcagccagaaagatttccagtacctgtgcccgttgccgttgattgtgcctttgccggaaatggtaaatccgtttaccttgtcggcattcaccagtgcggcgaagtatttcaggctttgtccttctatgcgggtgttgacaatggcgaagttgctgatgtcgtcacttcctttcagcactgcaccttcttccatgtatagatgcgttttcggcttgaagaagatggagccgctgaggaatgttcctttggggatgatgataacgccgccgccattctcggctgcccggtcgatgacggcctgtattttctccgtttgcaggattgtactgtcgtttgccacaccgtaatcggtaatggtatacttcttgcccagtgtgtcgatgtttacgatttcgttctgtctgaaccagtcgggaataggcgtgccgtcggggaatttctcttgcccggacatttgcaggctgataaatgccgtaaataggaatgcaatgattttcatggtttccgataaatttaaaatctacttatgaattatgttgcaaacataggaaacttagtgcaatgccggacgaaagacgttgatttaaattctgtgtaaaatgacttttcagcctgctttgaacacgcattccacacggttgccgtcggggtcgagcactacgctttcaaaatatccgtctcccgatgtacggggttctccgctgatggtatatccggcacttcgcagcttttccgtcagtttgagaacctcttctttgctgtcgagtgcaaaggcaaagtgggtcaaaccgagcctgttttccccgatgggagtattctgtacatcggtacggctcatcagctccaggtcggctccgcagtcgaagcggataaagtaggattcaaaccctttttgagggttgacgtatttctcattgcttgtacctttgaagtaacggatatagaattctttcatttcttccagacggaaagtccagatggcgatgtgatgtattttcataagtcaaactgtttttgttttatgcaatgcgtgttcatctacggcttccattgcaggtgtaaaatgggaaaaggattccccgaagggtcggtttcatctcttccgatgagttggaagcccatgtgcagatagaaccggtgagctttttcgttttgctcattgacgtccaccttatagatatgtttttcgtggagtgcgtattgcatcaactgcttgccatatccttttccctgttcatcgggatgtacaaagagcatttcaatgagttcgtcgctcagccccataaaggcagcgatttttccttcccggttacggatgatgtaaagctctacggcctggaaatattggtttcgtaccaatggcttgtagaattgtatgttctcttctgtcaggaaatggtgggtactgcgaacggaggcttcccatacggtgagcagttcgtcataatcttgcggggtgggtcgaaggattttcatcggatacttgttttggggttattaatagtgattactgttggtatgaaccttggttaccggttataatcggttacttcatagaagttagaagtctgctttttgagtgatgcttattctctttccggtcaccggatgtgtaagctccagcatttcggcgtgcagatacaggcgttcggctttccgtccatagagctcgtcgcctatgatggggcagtgcagtccgagcgggtgggcggcatgcacccgaagctggtgggtgcgtccggtgcggggataaaaggcgatacggatacggttgtccttgcgctccagtacttcaaagtctgttacagcgggcttgccatatccggtatgcaccatttgccgggggcggtcgagcgggttcgggcataacggcagttcaaccgttcccgcatcttgagaaacgctgccttgaagcaacgcaatatagcgtttgcctacactgcggtttttaaactgcgcttgcaggttttggtggacctgcttggtttttgcaaccaccagcagtcccgatgtagccatatccaggcggtgtacaatcaacggaccgtccgcatcgggataccgctcgcgcatcatgctgtaaacggaaaccacatcttccttgccgggtacggacaacatccctgccggtttattaaccaccgccagccattcgtcttcgtagataatgtccaatgttttcttgccggactgcaactctttcagaatcgggttctcgtctacttcaagaccttgcagcatatgtcccaatataggctcgcacttgcctttgcaggcgggatagtaatgtccgtgatgccgtatttccgttttgggggattctccccaccagaattctgccattgcaacaggcttccacccatgcagataggcttgttgcaacagcttgggtgcggcgcactcaccggctcccgcaggcggggttttgtgtacggtctgcccgaagatgtcgcaaagcgttttgacttctccccggtaattcagcatcttgaattgttcgaacagtttttgctgcaaggcggcagaacgttgcttacgttcgcttttcaatgcctgtatgccggcttcataatcggaaaccgtttgctgtaagggagcaatccgctctttccaggcacgttctatgcgtttgtattcggctttttggaactgactttcgcgtatcagggcgctctctccctcaggcgtcattggagcaccgttgggtaaagccgcttcgcgtcttcgctcttcccgtttctctttggcgcgtttcatctgccgtttggcttcttccagcgtttcttgggcagtttgccgcagggcagccagttgttgcatttgccgtttgtattcttcgtcctcttccaacaggccgatgcgcgtgttgatttgcgaaatctgttcttcctctatcttgaagaacccttgcggctgcaacaggtcgtagaccggcggtacgaaaaacggatgcacattactgcccgccagtatgccggagaatgctgccaggtatcctgtttcaccctcttgagtccttacaaccagaacaccgaacatcttgccctgagccaactcttctttccacgcttcctgcaaaccgagataggcttgcacctctttcgctgctgccacgcagagcggatgaggtgtatagcaaaaagggaaagtaaatctttccggcaatggtatgtctgctacggggatatggaaatggtgcaacatggcgagggaagttaatcgtcaatcaaattatcattgtccgtattgataatgtagggaatgttgtcattctcctcgtccggaacggacaggacatcttccgcatccttctgttgcggcaagggatgcggatacgctgatttctttttcttctttccgtatttgcgttccctctcccaggcagctttgcgtgcctgatactgttcgtattggttttccagatagttgtcggccataatctgtcgtttataaagtattcaacttttgcttttcaaatacagagaatcagggtatgctctgtattattttcttcatgctgttaaattttctacgtctctgtgttccgtttgtatagactccgaaaatttgtttatcgctcggtgggaagtgagaactcctgccagtcgtattgttgcccgtttccgtcggctacggccacccgtatggtgacatttcccgtctttatccgctcgcctgcgctgatggtggcggtgtatttcacgccgttgtgaggggcgatttgttctaccattacaggtggtgaaatgtaaatgcgcttcatacctgtggtttcggtaatcatcggtaccacattatatatagtctgttcaccttcgttcatgatttcgaaaattactttgcttttctcgcccgaactgattacgtggtcacggctgtcgtctatgaaacggatgttgcgtatccttaggttatcgaagacgcttggagcgggatacgtttcgttctgcggcttgtagggctccgttctttctatccggtaaccgtatgcctcttgttttggggcagacacagcatttccaatggctgctccggcaatggttccgataattgtaccgatggccgaaccccggtaaccgccccgccagccgccattattgtcgcctatcagaccgccgatggcaccgccgacatttccgccgatggctgcacctgcaaatattgcaccgggatcgcccgatgccgtttggcttgtgccgcaacccgacaggatgagcaacgaagcggttaacactccaatctgtctcttcatatcgttaagttttggttagttgtacaaagatagtgaaatatatggtaaatagcctgttctcttttactcttttgtttcttcttaatacataaaaccctcaggtatcataaggctatattctaaatgtcgtgccacttagctggcacaaatgtgccttttaataggcacaaccttgcctattaaaaggcaaaggttggcatgtcataatgtattgctccaataataatcttcaaagtaagaatcgaattcaatggagaaagttactccgcactctttgagtatgtttatgatattttgttgctcggcaggagataatgcccgttcgccattgcggacacgatagtaggtacggcggctggaattactgatgacccggttgatgaagaagtgtgtttgtttggcggtgaggttttccagaatcccgagaaagcctttggcatacctcacctgcttattggagcaaaagtaagggcactcattcttgaacttggctaaatgcttgggattgatggcactgcaagatataagctcttccggcgagagcctttctgccaattgcctgaggcaagtttctgctttactgcattgccggttgatacaccataggaaattattgggaacatctgaaaaggcaagttctttttctttcattgtgaattgcggtttatgtgaggactctgataactatctgcaaatgtagccattcttattcttattaggcgtgagatgtttataaaaaaatctattattgctcttttatcaaaatgttatgtttatattcgcaaaaaaacagaaactgattattaaggaaggatattatgcttgcatatacatacatcgaacatggaagattcggtctgttggacaagccaaagcccgaattgaaggactctcgcgacgctattgtccgcgtgacacttggtagcatctgtaccagtgatttgcatatcaaacatggcagtgtgccgcgtgctgttccgggaataacggtagggcatgaaatggtgggcgttgttgaacaggttgggagtcgtgttacttcggtcaaaccaggcgacagggttactgtcaatgttgagactttttgcggtgagtgttttttctgccaacacggatatgtgaataactgtacggatgtgaatggtggttgggcattaggatgccgtattgacggcggtcaggcggagtatgtcagggttccttatgccgaccggggattgaaccgcattcccgattcggtgagcgatgaacaggcgctttttgtaggcgatgtgctggctacgggattttgggcggcacgcatttcggagatttccggggaggatacggttcttgtcataggagccggccctacggggatatgtactttgctttgcgtgatgctgaagaaaccgaagcgtatcattgtttgtgaaaagtcctctgaaagaattcggtttatccgtgaacattatcctgatgtattggtgacggagccggaagagtgtaaggagtttgtacttcgtaacagcgatcacggaggcgctgatgtcgtgttggaagtggcaggagccggagacactttccgcctggcgtgggaatgtgcccgtcccaatgcggtggttacggttgtggcgctttatgacaaccctcaaatacttcctttgcccgatatgtatggtaagaatctgactttcaagaccggtggagtggatggatgcgattgtgccgagattctccgtttgatagaggcgggaaagattgataccacgccgcttatcacacaccgttttcccctgataaaaatcgaagaagcataccgcgtattcgaaaacaggctggacggggtgattaaagtggcgatagcgggaaaataaaaacaagcttcaggctttattttcctgttttattttccggcagctggtgtgcgaagttgccagaaagctacggcagcagcggcagccacattaagcgagtcgacgccgtgcgacatggggatgcggactacgtagtcgctcccggcaatggtttcgcgtgacagtccgtctccttcggtacccattatgatagccagcttaggttcggcggtcaaggcaggattgtcgataggtatggagttgtcggtaagcgccatagctgccgtgcggaaacctaagtcgttcagtttgccgatgggagcgtccaaccaagtccatggtacgaggaataccgaccccatggataccctgaccgcacgccggttgagcgggtcgcaagaggtgggggtgagcagcacggcatctatgccgagagcggcagccgaacggaagattgctcctatgttggttgtatcgaccacgccgtctatcactacgatacgccgggcttcccggcatacttcctcaaggctgagtggcgtggggcgacgcatggcgcaaaggacgccgcgggtcagggtatatccggtaagcgtggcaagcaactcccttgttcctgtatagaccggaatgtctccgctgcgcccaatgatagttgcggcatcacccgtaatgtgtttctgttcgcataggagtgccagaggtttatatcctgcatcaatggcaacggaaatgactttgggactttccgcaatgaagatgcctttggtaggttcgatgcgattacgtagctgagcttcggtaagcgtgctgaaaatttccactccggggtgggatagggatgatatttcgatgatgggcatgtagctgtttcttttttgttattgtttttgatgcgttttcgtgaatcgggattaaaatcaaacaatgaaaaagaattactcttcattggagtccataactttatctgccagtggaaccagctcaaattcaagaatgcttgccggtatctcgcattctttaaataagtagttcaagatattgcgtttggtgtttgtactgcaagaagtatgaacgtaacaatgttctgccactttgcttcttcctttggcctcggaagcatgtatccagtaattcttaccggctacataggtcattgtagaaggactttcattgtatatgagtttgcagacttgtaccagcatttccacccagtttgagactgcatgccgttcgtttctgtagcgataaccgatgatttgccgccaactcagttcatattcgtcgtcgtcaaatgaaaccaactcatattccttttccagtggaacatattccgtctttatcatcggccatagccggaggaagttttcaagaagaatctgttgtctttctttaatctcgtcaatagtccatttagaacattgttttagatagtttgacaaacagaaagccgagtttttaaaaccgttaatcttgtttcctttgcggtctgtgtatccgtcctttttctcctgaaacgagtggttgctgtatgacgtattgaatccggtaagggttaggttggcaaaagtgtggagataggtgtcatatatctgctgccagttttctcccagttcttctttccactgaggtgttagtgtctgaggcatgatgtgttctatggtgaatatgccgtccttcattttttttacgattgtatcatttgcctccggactgttttcattttccatacgttcgaacaggaagaacttatagttgcttggaatacgataaatctgtctggttggaaaggctgatttaacatcgttgtcgtttggaaatgatacggttccttgtttcctgagcaaaatgaatttgaggatctgagagtacggtagaagtaactcggcatctctttccttatggcgtttgtatatcttcaaaatatcattatggagagtagcaaacatcttttgaagcgcatttgcagggtagttgcagataatccggcgggcccagtagttttcgattgtgtccaatacttcatactgttcggtttcgttcaggttattcgttgacgcatagtcaaagaatgacaacaggtagggcaggtgtacaagagattctatggttgcaatctgtttcagcttgcggttgagacgggcatggctggtttcgcctttgagtatctgccgataatatttggcaaacttcaacatgtcttcaaggaggacttgacggtcgatgtgagacttcatatcgtatgatttgaagtcaaaatataagtcctcaatattgctgatcgtgcctttctttagtgtcagataatcacggataaacattgtcggctctccatctgtcagtttttctattttgctccagtaggcatggtagtagtcttcctgcttcttggaagaaagtgacatgagcaggtagttgcgtaccttatctgcctcttcaaggtctttgccgcacgagtttagagattcaaaaatcaactgtggattatctttcgcttccaaacgaatatcaatcacttccagtttctcgatggctttaataagctcctcaaaagtgaggttgcttatctgaattaattggtaaaaaagttcgtagtttgcagtaatgcctgtattcttgatgaaatcatctgaattgttggtaaacagtgcatcatatgcttcgatatctccttcaatcgggcgcagttttatctgtctgtcaattctttttcttatggcatagagatagtttttccttacttcctcaatatcttcattgccaggttgcatatcgccattggcaactgcattgaaagcggccagaatcaggagcgataaagttgtgatacgctgctgaccatcgataatcagcaaatcgtcttcaacctcgctggcttttgttgcaacaatacttccgaaaaaatggctttgcaattcttctttatgaatttttatcagatcttcaaataaacgtacacaatgctttttctgccatgcatacttacgctggtagaggggtataataaactgtgtctttgcgccgtagaaatagtcactgatatttaccgaacctttcattttttgcttttagtttaacagacttcaattgttaagtttgactcatagctgtgcaagaatatgcgcaatctatggttactctcataaccgagttcgatataaaaacggggttagacccgaagaatatcgtttctcttgtgttttatactctaacataatatggtgttagagtataagcttttcattgagaataaataagatagcaataaaatgttaagtttatagtgccggattgtaacatttaaacgtttactgctatgttatcagcggctaaagttacagagatttattgtatgacggatgattttgcagggaatttatgttgcacaggaaaaaatatatggttgggaataaaatactgcaatatgttcaaattgtatgtaagtatccgataaagtacacattgtacagttagggaatcctcagttgctttgcaatcaaaaaagacatgaaacttcttcatgctgaaaacggaggtgtggtactctatgtaaacgtttggaaaagagtatgctccacttgtcatcctataacagcaaaactaggtattatgcattggggtggaggaatttggtaatgatggtagaaggtataagtgataatcttaccgatgcagattgaatgggaaaatatatcttatagctggtaatcatgatattaagaatctcaggcagaattatacgaagtactttgaacagataacgatgcagatgcatattgaagtagataaacagaaaatttatctgaaccattgtcccttcctttgttatggaggagcttactgtggtacatggtagcttttcggacatgtacataccagcaggcataacaccggaaaggatgttccgcgatggaaaatgcttttcccgaaaaactttatgaggaaaatagcgaaattggacatataacaaatacaaaatataggatttataatcagttactatgaatctgacgataagttttcatataaaaattagttttattctcagaaattgcatagtttcgtatttataatctttataatattgaagattaatgcttggaaatatatgtaactatcattataataatacataaatgcggtttatatggtagatttctatgaatactccacgcctgagcttgtaaggctattaggtaacagatttaaaaaatatagaattcgttgcaatcttacttagaaagatgtttctgagcaatccggtattggacttacaaccatccacaaattcgagaatggtatagcaggtaatatttcgttgtcaacatttattgtgttgttgaaagtggtcgggcagattagcactatagacaatcttcttccggagttgcccgaatctccttacctgatgcgtagggatgataaaaaagtacagcgtgtcagaaattctaaataggataaattatggtacagtcgttaaaagtaatcctttggggtgaggaaattggtagattggcatgggatgccagacgcaggttatcctattttatgtataatccggtcttcttgaagaaaggtcttaatatttctccattagcggcaccggttgatggatcaagaggacttaacctgtatggggagaagaggctaagatttatcaaaaaaattcagatgaattttatataccgtcagacgtgagagtggttggagtggaaaatggtgagaacttctgtcgtatacggagtcagaaatatctgtttggagataataaagttttgtttgtttccagatatccccagtcggcagatttaagggaatggcttatcaaaattcctaatagatatatacattttggagattttgatctggcaagtatatgtatatatcaatcagagttttataaatatttgggcgacagagcgagttttcttattcccgaagatattgaagaaagattgaaatctgggaatacgggactgtatgacactcaatatcttagatataaaaatctgaagattatagattcacgtttgaatgggttggttggaatgattcatcactatggtagggtgtatgaacaggaaggatacattgaaaaatgtgcatactaaatagggacattcagtaaatagtagtaaaagaaagcgtttttacaaaactatacctaatactgccccccgtattttctcctctaaaattcttcattgtttcacgttttaaattcgcgcaaactaagaataactttcagagagtaaaaatacgggggtgctgagtacttactttgtattagcttaaattctttaatctattgattgaattccgaaagattgtcaatcatctttttttagattcttctcgttttcttctttagatatagaagagtcattcacgaagtgcgaacaaggaaaaagaggacatcctccacaattatttcttttttgatctttgcaacattaataacagcttttcgtttacatataccatatagtccccaaacatctttcgaaaacggatatgccccagctcttgtagttgatagcatataaactctacaaattcaatattgcttgccataatatagattttcttttgcagcttgtattaaactgaaaataaggatctcttattataatattctgagaagttcttgatggatatttccgtttgttccgattacttggtttccttgtctgggattaagcttattcccaatccagtcagttacctttcctcctgcctcttctaccaaaagtatgcctgcagcatagtcccaagggttcagatacacttcaaaatatccaccttgccggccacatgctgtatatgctagttccagtgccgcagaccccaatcttcggatgtcttgtgagttttcgtagaccttgagaaacctagtaaagttttctttagccagttctcttttagcagttccgataccgatgatagtttccgacagttttttggcagaggaaacatggataggcttgccattcaagaaactaccttctcctttgactgcagagaaaacctcatcatggtatgggtcatagacaatgcctaatacaatttcattttgttggcaaagcgccaatgatactacgctgtggtgatagtcgtgtatgagattggttgttccatccacggggtctagaatccaataactatctgtgttcatctgttgcaagccggtttcttctccgagaaattggatttctgggtatagtttatataattcttcttttaggaagttctgtacggctacatccacttgcgtgacataatcggcaactcctttttcttttacatgggctgccatttcccggtttgtgatgatttctttggtttctttaaccaaatagattattcgttgtaaatccatgattttctatattaatgttttgcatagagtttcctcttagatttaatgtaaagttacttgtttatttaatattttatcacatgatgcgaatcaaaaatatcatttgaggaattttatttttgatttcattatgattgtcgtcttattttataccccattttattatcttgtatatatgaatgatatatatgcccttcagttattatttctagaataaagtgatgtgtttataatacttgttttagatatatgggagagaaaataggatatgtctaagtattcttgtggaaaagtcacgccttgttatcagaaggatattggagaatatatttaaaaaatattgtctaggaataagagttttacaagaaaagatatatgaaatacaaatacattcttcgatgtgctaaatatatctatggtttttagaatgagaagttctgtattttacatcctgaaaatgcctcttttgtcccttgggaatttcgaggaacaaaagggacaaaaaaatgtccctcgagtgtctgggggacaaaattgttttttataaaattttctgttgggaattgtactgctttataatacagattatcagtgtgttatatccatttttagcatagtatttaaagggattctataaatattgttaaattattggtaatcagctgtttaaatatttatcatttgccgatgcagtatgtgtacatcgttgattatcaatagtatagcgctctaaaaggtacaaccagcaggttggcaagtatctgagaatgtgtaagttagtgatttttagcaccattctcggcttgtatctccattttggaaagtaaaagtaagtgtaatttcttgaatatcaaaatgcgcggtacaaaaacttgtgaaaaatgccgatttttgatgagaaaaggtacaaaaatggctctgaaaaggaggggacattatgattattttgcgaagtactcagtctttaaccaataggtgtaaatcgggtcttggaatgagattgcatctgccttattattcaatgtaacattcttgataagggcagcctttgaacaggatattgaggtcgttgaagcgatttgatagcgatgcatcacttcggtcgaactgatggtcttttctacggctataagggctttgagatagttcaattactgtgtggtcagtgtttcggtgattgttacaaacaacagccttatgtggcagcggtcgctatttcttaagattgtttaagtagtaataatttgaacagaaaaggaagtttcatttcttttattgttcaaattattgctatatttgcagtatggatagacaattaactgaaataggaactattcctgtaacgacttcaatcatcgaatcgttatacccggaacttaagtctgcgaataaaaaagtgacctggcttgagaagcaaggatttatcatcagactgaagcggggactttatgtggttaaccccaaacattcaggaaagaccctatcgagtgagttgatagccaatcatctctatacaccttcgtatatttcaatgtctactgcactacgatattatggacttatccccgaggctgtatatgttcatcaatcaatgacggtaaagcactcgcgtagctttcaaactccggtcggctgttatgactacaaacatatctcaaaaatggcatttccaataggagtaaggagtatgtataaggataattatgcttttcttattgcatcaccggaaaaagctttgtgtgatttgattgccaattccccgcaggtcaatcttcgctatatgaaagatgtggaaacatatcttgaacaggatattcgtatggatatggatgagttcaataagatggataaaaccatattcgaagactacataaaagttggcaaaaaggccgattcaatttcgacacttttaaaattcttaagacgatgaaaaatgaaatattcgacaatatgctctcccgttatgatttaacaacagagcaacagaagagaaacgctatatttgaagtgaaccaacaagtgatacttgctggcttgtatgccggaggcttttttgagtcggcggctttctatggtggaacttgcttgagaatctttcatggcttacagcgtttcagtgaggatatggatttttcattgcttacgcaagatgataagttcgattttacgaaatactttcctgctatcgttgatgcttttacaatggtaggccgtgaggttgaaataaagaaaaaagacaaaaggaatttcggaaaggtcgaatcggcatttcttaaagataataccgatgtgtatgatgtgactttccaaacagagaaatctataaagataaagatagaagtagatacttgtccaccgttgaacttcaagacggaacagaagctattgcttcagccatattcatttatgacccgttgttttacacttcccgacttgtttgcaggcaagatgcacgccttagtatatcgtgcgtggaagaacagagtaaaaggtcgtgattggtacgactttgaatggtatgtacgccataatgttccacttgattttgctcatttggcagaacgatgcaagcagttcaacaatgaggatatcactccagagttattcaaggagaaactcattgagcgtctctcttcagctgatataaaacaagtgaaagaagatgtattgcctttcgtccgcaatccaaaagaacttgatatttggtcaaatgattatttgtaagcaattagtaaaccccgtcttgcaaggtctataaacataaagagatgcctcttaaaaattccgacttttctcttaaaaagtccctatttttacgagacatctcttagtttttacgagattcttaaatgataccttgtttctttaaagagtgtggcaacagatttaccagatccttggagtagtcactgtcatattcatggacatggttcagaaaataattcatccactgcttgaagtccacgtctgctgccttgcagcatcccatcagggagtagatgacggcagcatcttcagcagcgtcgtgattgccgcagaagagataattcttgcgtccgacagctacgggtcgcacactgttctctatcaggttcgtgtctgggagataccttccgtccatcgtatacctcaccaaccggcgagagttgttcaggaagtagccgatggcttttcctatgggactcttcggaagcacatttccctgctcacagatacaccacttctcaaaagcgcgtatgatgggataggcaagccgcttcctcagctccatgcgctggagggtatccatatgctggtcgtctgccatgctctccacatcatacagcatgccaatctgggccaaagcgtattccgccctcgccttgtcatgggttaaagccctgtcaaagtaccttcgggtatgtacccagcatcccaatgtcgttatgccttcctgtttttccaggatgttgtatccggcatagccgtctgtctgtatggctccctgataatccttgaagagctgcaggaccaccttggctccccgggaaccttcattataggcgaagaacaccagactgttgaccatgctccgtaccagccacaggtaaccttttaccgtccggtgcttctcgttgtcgatgatgggaaccgtcgtttcatcggactggatgtaatcggtggacaggacgagttccctcaaccggtagtaggctggccgcatcaggtcggccacatcgtggaaccagacttcgatcgtggaagggggtatgctgactcccaaccgtttgaacatctgtacctgacggtagaaagggagatggtccacatacttcccgaccatcaggtcggtcagcagcgatgcactggcatagctcttggcaatgggttcattctgtacgggcgctgtaacgatttccttcgtctccttgcgcatgcctttatgccggatggtcacccggacgtacagttcggcaggctggagttccaggtgttcggacgtttcggcatcctcgaacaggatccattcgtcttcatgccccagatagccgtcaggatagatgtgctcttccacgcggcggaggttgtccggcagtttctgacggaccggaacccgtttttcatgttccttgaccgtcaccttcctgtattcattcacctcctcgacagccttgcggaccgtctcttcctcttccggggtcatttccagcaggtcaaagtccagtttgagctggttggggtcatcggggatacgccgcttctcggacatggcaccccacatcttgcgctccagataaagaagtttctgttcaagttgtgctatccggctttccttggactccaaagcccggtcgcgctcctggatggccttctccttttcagccagtctggcttcgtagtcggcctgcatccttttgacgtccgagaattccttcagctgccgttccgctttcaccgcccgccggaactcggcatcacggtcgctgagcagctgctcgatgagggctttctggttggaggtttctgacatggttttctgttcttttcttacactgcaaagatacgaaaatcagaccattttacctcattttcagaccataaaaaacgacttggaacactactttttcttgggctcccatcgactgcaccgatgaacttccgaaggggatatcccttgtacgatcatcatcaggtcagcccattttataccctttgaagtggcagggtcatcggtgtcaatatcggggagtttgaaggctccccgttcaagtttcatgttgtagataaccagaccaccgtactcggcatggagaatcttcaacccggtcaatgatttgttgataaagatataggcatcaccgtcctgaacgttcatgcccatgaggttggtcacaatgccgctcagcgaatagaagcttttgcgcatgtccgtaggatacgggtacaggaaaaatcggtttgaatcattgaggttgaacatgggctaccgacataagaggattaacgaacggagcgcttccagagacaattcactctggatgcgcaagacgacaccattgggatagaccacttcacagggtacatgatccgttgcttctttagcggagccggtgacagacatgcccagcttgccgttttggtcaaacatgttcaccggaacaaaaccgcccgcctgcggcagcatggcttctgtaagtttcttacgccaataataaaacttgctttcttcaaagccggtgttgtgacaatagtcacgaatggaaagtcccgttgacttccattcttcatgaatctttttaaattcttctaatgtcaagttcttcattgtttcacgttttaaattcacgcaaaactaagaagaactttcagagggggaaatacggggtttgctgaatgcttacgattatttcgtgcagttggcagggatggtaagaatagaataatacaaccttaagctttaaagactaagatatttttctaatatgttcaatcttggattgtaataaaacgaaatgcaatgaaacatctatacataatcggaaatggttttgatattcatacagggcttgctacacgatatgctgattttcaactatggttagagaataactatcctttcatttatgaaaatatgcaggcggtttatgatatagatgcagaatggtggaatgattttgaagtgcaacttgggaatctagatatcaataaatttgtatcaaaatttactccaccagccaagcccattgatgaaattatagcagaggcaaaacggaaaagggattttgaggaaaggtacaacataccacccagtttgcattttgattcttattgtgcaaaacggcttaaaggtttgcttgatgtgttgcaatactgttttgaaaaatgggtggataactgccagagatcgattactgatcctaaatatatctatattgagaaagaagattcattctttattaattttaattatacggatgtcatcgaaatattatataaaataccagaagaaagagtccttcatattcatggtcgatcttcaaaacacgaacgtcttatatatggacacaataagtttctatatggaagttcaatgagttatgacgatgaacaagtatcttttgaattaaataaatatcataagaatccatatgaacatattttcaaacatcaagaattacaaaagatactcaaagatgtggagtatgtgcatatatatggcttttcattttccgcagttgatgaagattatatggattggtttttcaacaatgttcccgctacatctcaatgggaagttagttggttttctaatgaagataaaaacagaatagataaattcatattggatcactggagtttgaaggatagattaaagactatcaaattagaagaaataagccaaacaggaaaaccttagcatatacaatcataaacattaatcatagacaatagtcatataaaaggacctataataatttagtatattatatatatgagtcagtcacctataataaacatattgactagtggattacctggcaatgttactcgccccatctaccttgagtatgatagtagaagaagggagcttgaccggatatgggctaatcctgagaatcattatcaggtgcttcaaggctatgtatccacagtagaggctttgttagcaattagtatgtgtacatcgttgatcaatattatagcgctctaaaaggtacaaccgacaggttagcaagtatctgagaatgtgtaagttagtgatttttagcaccattctcggcttgtacctccattttggaaagtaaaagtaagtgtaatttcttgaatatcaaaatgtgcggtacaaaaacttgtgaaaaatgccgatttttgatgagaaaaggtacaaaaatggctctgaaaccgagggggaatcagagctattggtacacacaagtattaagcctgaataaagtcattctcgacatcattgctcgtatcggattcctcgtattcatctattgttggaagggtacctgacttaaccttacatagcatattgattctttcaagaatctgtttacctcgtgcctccacaaagtcttcaaaattgttatgtattgctgcattgtatgcatctaattggataaaatgagtttttaaccactcttgcaattgattgctattgtttgcatagtaagataagtattccgatggctgtttatttctaatggccaaattaagactcttagaaataaatgcaaagtttaatagactattgacatcatcttgtgttatcccaaaatccttataacgagaatatgggaagaaatggtgattttcttttgcattagaacgggatgcgtttgtattgtcgagttttacagactgaccattattgaaatcaacagggttattggctgctagaatacatagcacaccatcttttaccgcagatttatttttcatattaattcgtcttaactcattataggtgatagtaatagcaaaccttcgttcttcattctgattatcaatgattctcgttatccaatcagcatcctccttcatttttgttaaggaggcgctagaatatctgcgagaaaagatggttgtccagaaccaatcatcaatcaattgtttgtgggcattctccatatagttcttcccactcttaaaaaagtagtattggagtattggtaaaagtgattcatatggtaaaatgtcaatcttttgtgccccatatctttttactaaatctattgagagacgtagacattccaatgttcgtgtccaaacattttgacacattgatgttgttaaacttaattgattagtctgttgacagttccctattgcattaagcgataatgattgtgtgaatgtttctggctgtaatttaccaaaaagttttattgcggactcgtcgttaaactcttgtattaaatctcgtaaatcaaaatcagaagtccaaacagaagcgtgcgctaaatcaaataaagtcaatcgctttcctccttgattgatattttcaaatacggtaacagcttcatcaagttctgcattaagcgtttttatgatgcttattgggtaattgtcaagaatccttttacattcattcattattttcatatattgaagtcctgtaatgggatcttttgatacatattcttctatgatgttggatagttcagattgattgaaaattttccaagctggaatattattgggttctgtttttaatttaggaatctgaaaacatttgcggtctagattaaaacagattgaagcataatcaacgtccccaagtttctttcccattaatgacacatatagtgaagttattcgttgttgaccatcaatgataaacaggaacttgttagcttctggtttttgctgaaacccgagttcttttatttctctacaaaaattagagtatttggcatcagcctcccatataaaaaatgaaccaatcggatgttctttataaatactattcagtaatttaacaatcttggaacgttcccatacataccctcgctggaatcgaggaatttttatattaccattttctagttcgttgaacaccctttgtatattccagttattagttatttctatttttttgactcatatctaagaatattataatttctattattttgcgaagtactcagtcttcaaccaataggcataaatcgggtcctggaacgagatttcaccggccttattatccaatatgtcattcttgataagggctgcctttgagcgggatattgaggtcgttgaagagatttgatagcgatgcatcactttagtcgaactgatggctttttctccggttataagagccttgaggcagttcaggttgctgtgtggtcagtttgtcggtgattgttataaacaacagacttatgtgacagcggtcgctatttaaaaaaatagcctaagtagcaatattctgaacagaaaaggaagtgttatttctttttctgttcaaattattgctatctttctatgaacaatatattgtttgttatctgtaaaatatcagccttatgaataatatagtagcatttaatatctccaacgcccaataatgtgagcaaagcagattttaacaggaataaattcaaaaattacctctgtaacgcatcataaaataaagtaaaactgctatatttgcatattatatgatatgttgagccatgacaaaaagtacaatgggtaccaagttgccaagaaaattggagcagaagatgcagatagtaggtgagcagatcaggctggccagactacgcaggaatcttagtattgcccaagtcgccgaacgtgccacctgttcacctctgacggtttcacgcatagagaaaggtgtaccaacggtggcaataggcatttatcttagggtgctttatgcgcttcagttagatgatgatattctgttgcttgcaaaagaagatgcaatgggaaaggccttgcaggatttgaatcttaagaaacgagaaagagcatccaaaaaagaataagcgatgaaaaaactttatgtatttgctgatttcgattggctgaaagaaccaaggctcgttggagagttaagttacgaatcacttcgtggctctgacagctatggattttgttatagtaatgagtggttaaaggattatggtagtttgtttcttagtgacgatttgaataactatccagggcagcaatatacagctccaggtaaggatattttcggatgtttttctgatgcccttccagacaggtgggggcgtacattgataaatcgtcgggaacagattctagcaaaggaagagaaacgtccggtgcgtcggctttcttcattcgactatcttattgggattgaggacttttctcgcatgggggcttttcgattcaaggagtctataaatggagattatattaatgcaagcgaaatcttgcgcataccaccactgacagatattcgtgagttgattgcagctagttccgaaatagagaaaagtgaagatgagaacaggttacctgaaatgcgttggattgctcaactggtacagcctggttcatctcttggcggagcacgtccaaaggcaagtgtaattgacgagaacaagattttgtatatagcaaagtttccgtcccacaaagatgattatgatgttggattttgggaacatttctcacatctgttggcaaagaaggctggtgtcaatgctgcggatacaagagtaatctctactagcgacaaataccatactttgctttctcgacgatttgacagaagggaagacggtaagcgcatacattttgcttcagccatgactcttttgggcttgaatgatggtgacaatgctaataccggccatggctatctggatattgtcgatttcatacttcagaattgtactaacgtggaggataatctgcaagaactgtatcgcagagttgcattcaatatttgcattggtaatacggatgaccatttccgtaatcacggtttccttctgacagctaagggatggactttggctccggcttacgatattaatccaacgctgaatgagtatcagagtctgttaattaacagctataccaataaatcggatttgaatgaattgctgaattcttgtgaggaatatatgttacagaagcatattgctcggcaaatcattagtgaagtactgaatacggttaagtattggcagtcattgtcaaaccgattaggaataataaaaactgaacaaaatgtgttctatacaatttttgaacgacaaataggattatataatcctaagtcttaatatataaataaattcgacataagataaaataaataatcaactatcaaaaactatattatatgtctcttgtaccaaaaccgtttcatgaattgctaaaaatgcatttcattataccgccgtatcaacgtggatatcgttgggaatcacgtcaggtagaggaacttctcgatgatctgctggattttgtaaaatctatgaagtcaaaaagaaaccgtaataatgaaggccgtgaaccgtactattgtcttcagcccattgcagtggtaagtcatccgaaaaatgtagatacttattttgttgtcgacggtcaacaacgtcttacaactatatatatccttatgcattatctgtcgaagaacagtgattatgaatacccagtatatgagttctctctccctagtagggatattcagaatgaatatctggccaaacttgaatttatggaggatgataagaagtatattgacaacatagacagtttctatgtaaagaaagcgtattcaacaattgtagcgtggttctcaagggacgggcatgataggtataagggaaaaattcgagatatatttgctatggttccggatgatgacgaagaacaaaacgatgtccgcgtaatatggtatgaaatcagcggtaaggaagctcacagagctttccgtgaacttaactatggcaaaataccactgacttcaacggaacttgtcaaggctttgctgctcaggaaaggaatataaattcttctggacattacagcaggggtgcatcatatcgcagagcgcttgagtgggactcaatggaacatgcattacagaatccttatttatggtcgatgctggcagaagcaaatgacggcacattgtctcacatggaacttgtactggattttgtggcagacagactgaacaatgaaatgactgacgagaatggcaacagacccgtggaacgcaaggaatctaagaattccagggatgacttcaattatcaagtaattaatgaatatctgaggaggaatgacaatagtagtgatacggtagatgatgtatggaaaagaatacagataattttcaatctcgtatcgaactggtactctaacaggcattggtatcatttgatagggctttgccgtatactgcaagttggaaagcaaaggaaacgcagggatttcgtcgagtatatctataagatgtctgttgatgaaaacggaactcctattgacagaccgcagtttaccggtagacttgaaaaggaggtgggcagactggtcagactgggtaagggcattactcttgaaagcctccgttatgatgaaaacaacgatgccataataagagtattaaaactgctcaatgtacaggaagcaatcaatgacaatacggaggagaagaggtttgcttttcatctgtttgagatattcaatgtgacatcgcttgaacatatccatccgcagaacattacatccgacatcggttttgaggatttcagaatgtggtttgaaaggagaagtgaggatttctacaaacttgatgatgccgaattgcgtgccttgctccagaatgatatatctaacaatccggattctgaaaccatggacatggactggagaattgcagagaagaaacaggaagttgagaaggctatcagtgttttgaagtatcttacatctgacaaaaaaatcttttcggatgattacaaccagaacgaactggatcgaaatgccacaatccttgacagatttttcggagacctggccggaataaaaccggaagatatgcatagtatcaggaatctggccctggttgataaaaaaacaaattcggccatgcagaattatctgctggacagaaaacgctccattcttatggaccgtcatgacagttgtgacgtttccaatccgaaaaatctaaaaggtacttatgcaccaccggcaacacgtaaggtgttctgtaaagagtattcaagatgctctcctggtgatatgcgcttatggcgtccggaagacaggaacaactattttagagtcattaatgacgtatatgattattacaccttaaaataaacaagaatatgctcaacaagaatactgaaaaatacaataagttcgccggtaggaacggtgtggctatccctatcattcaacgtgactatgtacagggggcggatgtgaacttcgagaaacgtgacaagttcatcaagaaactgcttgatgccctgctgaactgtgaaacgtgtgaactacatttcatatatggctctacggatatgacaaaaccgtccgaaccgtattttcagccggtggacggccagcagaggcttactacacttgctcttataggctggctgttgaaccagaaatgcggccttaaatattcaggttgcctgaagccgcttacatatacttcacgtccgtcaacagaacagttctgcaagcttatgcgtgaattcaaactgccggaaaatcctggaaccacgatatccgattacatcaagaatgttcccggatggttttctgaatcctggaaactggattcttcgataaattccatgcttgaatttcttgacaaggctgattccttacttggctctgagagatataaagaccatatagaggatatggcggaaacgttcttcaatgattctccgtttgagtttgagagccttgacatggagaacctggacctgaatgatgacttgtatgtcaagatgaatgccagaggtaaactgcttacaccattcgaaaactggaaagcggaattcgaggattttcttggtaaaaatttcaagggcgtaaagtatccgttcgggaatattccggggataccggatgcacctaccttggaagaatactttgaatattcaatagaacatgactggtgtgatatgctgtggccgagagcgtacaaatgctggaatgcaaaaagcgaggaggaaaagaagaaaatcttgtatccgtccattgatgaatggtttatgaacctgcttgactacgtgtcgcagttccttatgtttgccgctatgccagatgcagagtctgtttacaagaacagcggacttaaaaacatgaaggacctttatgctcatgaaatagacagttcaaggattgaagtgtataaggaggaggagaatgtgataaaactgttcaggattcttgatcttcttgtggatatctacaggagatgtggggattttggtgctttcatgtcgcgttattttattgcaacttcttctaccgtacgtctggagaaagaggtggagagacataaggtcaacttatttgactgtaatatagaccttgtctcaacatgtctggaaatggggactgatatggatattacatcccagatagttctgtggagtttcttacagtggatgctttctcatccggaggagctgctatcggatcctgacatggttgcctctacagattacttgcgtgttatgaccggttgggtaaggggtatgagacagcgtcttacgaatggatatcaggttggagcaaatgcccgtttgtcggatttccatgaagcagacattatttcaaataaactttctgctgcagccaatatgtttgatgctctactggaaacaacggagaagtcgcttgaggatgaacgagttaaagccaaattgtatgctacgccaaatttcgatattatcagggaattgtctacatgccgtcctctttattattcattcgggcttctgatgccttccattgtaaactgcactgatacggaaagttacattaaaaggttctatgaattctggactataagtgacacgaaaagggtccagaaacttgtaggctgcggtttcaagggtatcaggccatatgtggactgttggttctacggtatgacaggaagatgggattatatcttcactataggtaaagatgacagagggtttggcaatgctcttgaagcttttacgcatctgatgaacggtgatagtcctatatgttattcttatgataccatgtcttattatatggtgaaatataaggactttgtagaggcaaatgggggtggtgtgatgcgtcactatttcaggcatgatgcaggtaatgaatttactgtatggaccattaaatccccaaaaacgaaaccacggcagggaactaatactgacccatatgcctacactgtgcgtaagctctatgaaagtgaagaaagtaatgaatacgtactcagtgattggagtgagaattcggaacatggagcattgtacataaggactgagggttcggattcttatgccatgtatatggaatgcaatccaaaaggttggtggattggcatatgggacaaaaggcagaaagttacgagaaagtttggaaatcgttttgaaactatttcaaacgctgaaggaaatgctattggttttagggatactgaaaatatcttcagttttgacggtcttgtgcttcttgatctccctagtaaagaccgtatacagactgcacttgcttttttaaaagttatatcataaaggatatgagttttttagaaaaaatgatactgtttcaaaaggtgtataaagtgagcaaacggatgttgactttccaaatacatttttggaacagtatctaatctcgttttattagagtaataagatatatcactataaaataaaagactcaccctgagcgtgctgttcacgagaaaccatattaagcccagaaatcttttcatcattttttacctctatcttgtttgtaactatatgtcaattatgactgccagtcagatttatggtaatgattcactaatcatgtgattttgctaatctaatgcctaaaacaaattctataacaaaattaacgagggcaaactcagactcgtgccctcgttaaaataagattatatttaaatattataaatttcccgcctttttttaaaagcccgctttccaccttccaaaatctcacaacaaagaactttcgtcttttcattatcaattgatccacgatccattatcatagaattggagtgtgtactttttaatgggattatcaattctgcatctcctaaaacggcaatatttgcattatgagtaactataataacttgcctatactcttttattctgcgaagattacgtacaatcgacttatagataaactcactgtccagattgtcctcaggttgatctatcaataatggctttttactatctgattgtaataatattgctaaaaggatagattgttgttgtcccattgatagttgatacaaggaacgtgtaatataccgttcgacacctgtgtcatctgtaattttcttggcaacagtaattgtcggaaggtcatcaaaaaattcactttcaaactcttcataccgataatcttctaggcatttggctaaaaaaacatttttgtcttcctgactaaatacgctattaccattttcatctttcaagttgtccataaaagagaaatcttttttaatcgcaaattctgcgagtttgagcggtgttacatttttaagaatagcatccagttttgtttttctccattgagtaatccccaataataaatctctaaatgttgtcgtgtactttccttcagcatactttagtgttataaaaaattcatcaacattatttttaagactgttactaatagttgtggcaaatacatcatgagtcattttacgtgtagacgatatcgatattcgttctttaaccaattctcttctttcttttagcttctccttcaatattttttctttatcctctatttccttgagtttcttggcataagtcatgctgtcatttattattttatttattttgccaagatcaaaaggaataccctttgtttccaattcttctctctttgcatcaattttttgctggtattccgtatcttttgctttccaattatcaatagataacttgagatcatttattttcaatttaagctcctctattaattcagtatgttttgttgcaacaattttagcaaattggtctacaatgccttttacttgctctatgtattcagatcctataatgatatctttagtgtctaaactggtgaaccattcaaaaaaactcttatcagataagatagcaccatattttttcactagttcgttaagctcattgataacacttttacgtatctctctttcctttgctaaagaaagattaaagttaactaaatccttaaccttatctttttgaagatgatttaactgtgcatcaaagttactttttatcttttttacctcttctttttgcttaatgtctaatcttaggcgggtcaactcggattgattatctcttaattgctcccgaagttcttcatctcgcatatttaaagcagataaatcgacaaagttattcataaagtttagcaaatgaatagggctttcttcacttttctttattgtcatcgcagtttccccttgcccgtaccattccaaaggacaacgatcgatatcatctggaactaaattcacggtttccatattcttttctcgacggaaagaatgcttagtcccttgttcatcaatatatgataaagtgagtacatctggccaaacttctgtattaattacagaggcttcagtatgggcgtttgcacctgcccttacgcattccaaaagagtagatttgcctgttcctcttcctcctataatacaagtaaggtttttgctaaaattgataatttgtttgtccaacaaaccaccttctatagtaagtgtttcaaaacaaggaacaacttcaggcaaatcgctttctattcttactcttgaactaccacttaacaaagctattctaaatgagtcaaatgtcaagtcatccatttttaacctagtaagttttgcctcgtcgtcaatatttttaccaagttttgcaatagtatgtgcgtcagatgacattagcttgggtaaactatcagtattatctttatcaagtgttgccaatcttagattcattaaacgttttctatcagcagccttatctgaattgtcttcttctgtatacaattttgcatttgttttgtttgaaatttcaaggccatacaagttctcatgctttaatatttcgtccatttgaggattaaaggctcctattgttttttcgaaacctgcatcaatatcaatgtgagcaagaataccaaaacccttatattgctgtgctttagtaagacactccacgattcccgtttggcatgttttcctgtctgcagagattgttacttgactaataaatgcacgaaggttttgaggtgtctcaaaatatagcagcagatgcccctgtatggtggataattcaactccaggtattaccaatatattctttccttgtgcatactgcacagcagtgcatgaattagttatttcgttatgatctgttatgctaataacagaaagtcccttgctgatagctgtatcaactatattttgaggattcatttgataatcatcaacatcataagaacctccatcaccataactatgtatgtgtaaatctgcttttaaaaaatgagctccatttgaaataatttccatatgattaatgtctttagtattaatatattcactttttcattcaattaaaaagatatttgctaaattaatttttatgactattgttgagataatacaaaaaatctagattaatttgaggtgtaacaactataatgacttttcttattccttaaagccgaagtatacgatgtccatttccatatcgctgatcaggtcaccttttttcagcctctgtttggtgttttcttctgaactaatggctctgaaaatgatatcaatgattctgagtcctttgggatatcggaaacctttgtttcgtcttcgtccgcggatgttgatggatatgtgccccttgttctctttctgacttctgaatagcagtagatctgatttgaaacctcggtactttgtgttgacttcacatacatcataaccaatctgtcgaaggtcaaatggtttatccgaatggtagaacgatgtataataaggatgaatgatgatagttccttcatcgaagatttcctttagaaaatctcttgcattctcgtacaaaggatttctaccataactaaatgactctcccataggtttttgtgactgaggcatcgatacgatccatttcctatcatcggcggtgtcggtcaagaattccttcaatttagccctatcaagagcctggtaattgatatctatttctatgcacttaaggtgattgtcgacaatggtttggcgttttttaccatcgactttatggctgactagaaattcaatgagcaaacgctcaccattatccattataccttccacatccgaccggaaaccatagtgttcatcccacttctctacttcaacattgtgtattcttacgaaaccggaggggaaagcgccactgttggattgaggtagcattatccatccggtttcctgaagaacttctttggcgagcaagtggagtgaagattcgtacgccccttcacattcgagtccgtgggcgtgtgcgaaatggtgttcacggatttgtccggcattcttagcatatagaggagcattacaatgagggcagtgacaactgcacttcatgcctttggcaacatcatcaacgtggacgagggctccgccttcatccagcgcaaaagtcaagaatgcgcccataattaaaatctcctttctatatatctcaggagttctccatccagttctttggtaccatgaggagcacgaagaaacccgtgtttggtaagattctcttccgtgagtttaccggatttagaggtagcctcaaggcgaaacagagcatatttagcctcgctctcgtcctgatttatacgttctttatcgacccaaaattcctcctccttaaccatccactggtcgtagcggacattgatagcctctacggtcatccggtacttgatttcacgatcctcggaaacgtagatgtatatagtatcgccgaggttgacgttatatcgactttgctgccaatgatactcgccatacttctccaaacactctgccagacggaaagtactacgcttggcagtaatgagccacttcttatggttctttgggatgatatgcccggccatatttacgcggttgctattgggaacaatgtctagatggcagtccattgcagcagcgatacgacagagaatgtcgagaccagcggaatactttcctttctcgatacgactcaaattggaagcatcaatatcggcaagctgtgcgacatcccgagcatccatacggcgctccatccgaaggctcttgatttttgctccgatgcgctcacgttcgttttcgcgatctggaccataccagaagatgctagcccagcaatgacattgatacataccacgaagaatcggtcccattataacagaagggtctccctggtaatatttgtcgaagagtgcagcgataatttggcagtgctgctcctgcatttcaaaagggattactccggagagtcccagcgtgaaacgatcaccttgtgacgtttcaacagtcaccttatccaggctgacaaatttacatttagttcttgtttccataattctgcaacagggttaaccttaaacatcaagaattacaaagcaaatataataaaaagccttgactttacaaatttaccaagcaaattattttataagagcaaagcgttcttctattactccaaaatacaaactttattgagtcaaagcgagcatttcataacattgtgtattatatatgcataatctaaatttaaaagttatgatttacggatacattagagtaagcagtgacaaacagactgtagagaaccagcgttttgaaataaacaatttttgtaaatgtaataaattagtaattgacgattggattgaagaaactatcagtggtacgaaaaattacacgaaacgacaacttggtcgtttactacgtaaagtgcgtaaggatgatatcatcatatgtagtgaactttcacgtcttggacgtaatctttttatgattatggaaatcttaaatatctgtatgacaaaggaatgtagagtgtggacaatcaaagataattatcgattaggtgaagatatacaaagtaaggtccttgcatttgcttttggattatctgcagaaattgagcgcaatcttatcagccaacgtactaaagaggcactggcaagaaaaaaagcagaaggtgcaacacttggtcattgtcgtggctttcgctgtagactcaatcccaaatgtgctaacaagcacgattacatcgtaaaagaattggctaaaggaactgaaaagacggttatttccaagaaattaaaagtatcaaaaacaacattatatcgttatttagtttatacagggcttcatatacctattaactgccaacaagaaggatgggaggattatggtatctatcattaatttttatgtactacagaatcgaccctcaaaagagggcttcgatattgtcattggcaatccaccatacggcgctaaatacgacaaccaaacaaagaggtattataagaatacctatgtgacggcaaatagtatccaaggattacagaaagggtctcttgacacatataccctattcatagaattgggatacaatctgcttaggaagaatggaagctttgcctatatcgttccaatatccttgacatcgagtgattccctaacaggtgtgcaccgtcttttgataggaaattgtgataccatatacatatcatcgtatgcagtacgtcccaagcctgtttttgaaaatgctgtagtaaacacttcgatactcttttttaagaagacagaaacgccttgtcagcatcttttttcaaccaagatgcacagaagagggaatgagtttgaattgcaaaagcttattgataatatcaactttgttgatgtcaatggttatacaatgacaggtcgtattccaaagattggcagtaaaatggagaaaaacattctcacaaagattttcaaaaatactccaattaaaactttttatgatgataaaggtgaaccaatctattataggacaactggagggcgatattttaaggtagtaacaaattatccgactggttcaactaaagagaaaccactatacttacaaaagcgactaacgaatgctattggttgcattctcagcagttctttggcattttggttttaccaaatctattctaacaatcttgactggaagacatacgagatagagaatttcaccattccacagctttcaactgagaatattgagtatcttgacaagttatatactcgttatctttccgacatagaggctaaggccaacataagaacaacatctggaaagtctacctataatgtcgattcatttaaggaatataaaatcgtacggtcaaaaactatcattgatgaaattgatgattacatttgtcctctatatggtttgacggaggaagaaacagactttattaaaaactatgaattagagttcagactcgcaggagaatagacagtggagggttaaacgccctccacaatctttatttcattttcagatagtccgtaaaggttatatactagacaatcaatctcatgctcacttgaagatacatctgtctgtttgtttgttgcctttgcattaaggatgttttcaacctttaatgctatttccttctgctgttgttttgttccaatagcaatcggtaaagcttcaattgttgatgccttaagcgtataagcccctccagctgtcataacgccaataaaaccaaagtaatagcgcaataatttactattcaataatccaagaataaacctgattggaatagtttctgaagtcagaatataggcgttacttggtaaatagtgttgctctgtatcaagtgtatatgcccatttatcagcagttagtccccagataattttttcagatttttcaaactcacggtagtatgccgtattatccaatatttcaaaccatttataatttccaggtttacgtccttttgtactatcctcgggggttttaggcttaagattatcataaaaaccatataaatgtttttttataaatggaaatttctcaatatctgttcctctccgggtaaaaattaaattctcttcactttcattgtaataccattttctaatattacgtccttgtagcatattctttataattttgctattattgtgatcttctgctataagtttgttacgttgctcattcgatattatgaatgcaggattatatccagtggtaactcctcgatatattttcacaccttcaatattttttaaagacaaatgtccattttcgattttttcctttaacatcaattgcttcttatctgaaaatgaccactctttttcgtctagatagtcttgcggataactaccaaacatactctggcgttcaacaaattgtctcttaaactcttggaaattaagcttatagaacttttcatatacaaacagattctttttcatcttatttttcttagagacattaaaaattacacttgacaccaagacatcttcaaaaacctctacttgttcgaagttgagaataatgtttatatgttgagaagaaagttgctttcttaccttttcaccatagcctgtattaaaaaacttgttggtggtgatatacgagattattcccttttctgcgagaagactcaatcctagttcattaaaatatatactcaggtcagcagttcccgaataaatagaaaatatttcctttaaggtacttgcaatatattttaatttttttgcttcaacatatggcggattgccaatgacaatatcgaagccctcttttgagggtcaacaatatgtcattgatacaatgcttccacaagtccattaagttgttcttccaattcggagtagtctgtatttttttctcggcgatgtagaatttcttttgctataattcctatagaattttgtacttctctttgtggaataggtattggaagattgcggatatgttctggatatatgtgatagtcacctcctcgttggtctgccaacaactggtcagccatagaagaattaaggatacccaacaaataatataggtcaaccttttcagatagagattccatagctgcacggttatgtttgcagaatttcttgatacttgaagataaactcttattatagacacctttcaggtctttccataagacagcacaaaacatagaatcgctatgcaagaaatgagtgtccatatcaagatatacctttagaacgcctaagcgatttatcaataacttgggacaatcgtacagttcacggaacgtcggacggcgtaatttatctgggcatcgttccgtgttccattcaagataacgtacccgtttgacttgaaatttatctatatcctttgcctcaatatactttctacaatggatggcatcgtatgaatcacttatcaaatcctcttttttgaatgctccttgggcatccttctcattggcattaacgaccattcctacgcttatatagcagaagtcacccaagacattcatattgacaaaacggtttccagttctttcctcttctgtcaagttccaaacataatttttattgtcttgctttaattcctctggagatttgcttaacacttcacggataatcttgtcctcaaagatttgagtgatgcgaagttcaccctctggctgactgttctggataaatggaatacagttactcaccgtggcattttcaaaaatctttgttccgtttagatcggctatctccaataagcgatactcttctgcaagcatcttacggagtttcttaccatacttttgatttgtcaaaggatatggtacaatcatagcaaagatgcctttaggacatagtagttgtaatccaagttccataaaaggcacatacaaatcccatttttcattaagcgatttatatttcttgcttgccacaatgcgttttcgctgttcattcaattctggtgatgcaatctgtgttggagcactgatgtatggtgggttaccaatggtaatgtcgaagccgcccccgtttgagggtcgtgagaaaacatcatggaaccaggtatgccagaggaagaactgactgtttgcagacaagtctataccttcaaaatcgatatgaattccttgttccatgagctcctgctttacaatatctgagatgtcctttctcaactgtaccttcttgtcatgttcagggcaagcataatactctgaaagtttgtcgcgcaaatttttacggtaaacatctaacatactatcgaataatgtaataccttctgcagtgactttcttatcagtcattgttgaaaggtctgcacccttatactgctctaacagcgagtttccttgcataattttgaaatcaaggttaggcagagcctctggcgacttctcgtcaacaatcagtgaaagccagaaacgcagacgggctatatctacggcaccacgttcaatatcaacaccataaatgttattctgaatgatgtggcgtttaattttggcagcattctccataatatttggctctatggcagaacggcaaaagaacaattcgcgcagtaatcccattggaaaagcaccagatcctattgcggggtcacatatctttacgttgcatagttttttgtctatttcctctttcaagtctccaagtaaggtagcatcgtgtgttgtcacaaacaagcgaatacattccttgtcttcttttctttggtctgtttgcagataggcaatcagactttcacggcacatatactgaacaatctctttcggtgtatagaatgcgcccttatccttgttatcctccagcaagttttcaaaaatacgtccgagcatttcggggtcaacacccacttccgcatcgtttgggtcgttttcatcaatggtaaaattgtattgagaaagcattgtcagcaagtcatcaaaatagctggcaggaaaatgactcggttttttgtcaagaatgtcacgttcaaacagaccaccgttcaaatatggaatacgacaattacggaagccttctactttagtgtcgtaaagatcgccctgatctgaacggttacggtctaagccgtctgcaaacaagccttccaatacttcatcaaggaagttttctttctgattttcgttcgcattcttgaaaatattcagcatgaaatcatgatcgccttctccccattccttgcctgcaggaacgccaagccagcctttcttctggaggaagtgcaggaacacaatgcgtccaagaagtttcttcacataatcacgaataggtttttcctcacggtcgcgaattttgtcggcagtcatacccgtatggtcaaagtctgtatcaataaagtgctgacgcattccgttggtaggatcaaccatataatttacaaaagcctcatattgagtcttgtacttcccgaaaaactctttagaaagagcttcaacattgaatgcattttcgatgtctttaatttcaagagaattccttttgtcatatagggccatgaaattgtcagttgccgtgcggcatgattgaccaggacccagcaggaacgtatatcgtttgctatcggtggtttcttctttgttgccgctttttcggcaataggtaaaacgccaatcccaacgagtatcatcctcgtagtgaaacaacatgaaagcacaagagtactgatccatgacagtacggatgagccgttgaatgtttacacggttacgctccatcataacgcggtcgttgactgtaacgtcgaaaatatgcaatggctcaacgccaacatatatcattccaacttgcttgatgctgcgtattcccgtcgcttctgccagttgttttcgttcaggctgactttccaaaagctctgtttcaaaaccattctcaaagtcatcttcaccaaaaattgggaaaataacattgtggagaaacgaactccagccttgatatcggctgcttaaatattcttttaataattccttattcatggggttgttttttacttgatggttcctaatacaatggctgcctcgccttgcttactttctacatgggctacaagtttgccaatttctcgctctagaatctcgtcaatatcttgttgctctatggcaaaaagacgtgaatcccgctcttctaattcttgaccaatggccaatacttttttgataatatcaaaacttcctcggtcaataaatttacgagcattttttagcaaaatcttggagtgttgtgataaaccaggagtgttattaattttcactaacatttcttttgcagaggtagccttgtcaccagccctagacttgttgatgcggacaaagtattgattataagtctttatggcttctgttgaaagctgttgccagttattcggcagtggaacacgtttggcattttcttccacatgcagatcttctagcagttcgagcaaagaaattattttggcgttatatagcccctcggcttcagtacgtattctaattgcaagtcttgcagagcgtggcgcttttactatgaaatatgcagttccacttgcagcttgtgctatctgccagtcttcattagcttgttctatttgcagataacgtttagggtgagtattcttgtatcgtttgagctcatatacatacttctgcaaaggtgattcttctccgtcaacggctttggcaatatcgtaatgtaccacactttcttcttccgagaaaatcttgctgtcttcaccgaacaggacatggaaggattgcaacttagtatgtgccttgcgaaccaactgaatctgcgcatcgccttctgcacttggcatgaagttatagacatagacaaatggctctttacttccgatacggtttacacgacctatgcgctgcatcaggcgagtggaattccagggagtatcatagtttaggataacattggcacggtgaaggtttacaccttctgccaaaacctctgttgtaataataacattgtagtcatccttccagacaccctcgtaattggcatcgaaattttcttcaatcgtatgttccatctcatcacgattggcggcagtaatgacaagtgccttatagccctttgcctttactgctcttgcaagtgattgtacagtatctatagcttccgaaaagataaccaattttccagaggtatttttttgtgggttaaacaattcaggcttgatactttctttgaatgcatcaaatttcgggtcttgtgggtttttcgcccatcgatcatagagattagaaatgagtctgaaatcttcttttagttggatatagtattcttccttaaagtctttacgtttatattctgcattctgtcccttttcgttacgcccttgttccgtcaactttgttatcttagctctgatgtcttctacgcaatcattaaacgaaacacgtttaccacgttttattgtcttggcttcatagtcaagctctttgtttacgtcaatttgcgggcaaacgaaaattgtgtcgttttcccacatcttaatcatgttctctgtgtaacgtcgcagattcagcagggattgagtaaaagcagtgaacgaactttcaagacgcttcacaagaagaatctgcatgattgtggcaagttgcttggcaacgtcgttgacaccacggttacctcgacctgtatgttttctttcgttggcagggtctacaaaatattcaatagcacgatagcggaagtattttagccattcgtcagtttgcaccttttcagcctccgttggagcaatgattgtcatagtatcagagaatagttgagctaactcgtcatccatgatgtattcaagattgttaggtccaactattttgggaaataccaaattttgtgatttcatatcatccttgtaatatttctcaacatcagtccttgttcggcgttccaatatatcacttaatatgcagtcacgcagtctctttgatacagcatccaaacgtcggcgacgctcttctgctggtatgttattgtttttatctatcagcagttcatattctcggttaacgtctgcaaagaatttttcgatatttccactttcagccttcttcaatgtactatcattgtggtttctctcaaaaagataaatctgattcttcaagtcgtttggtctgttgttctgtggggtggcggaaagaagacccacgtatggatatactcctgtattagaacaaatcttctgtatcagttcatcaagagactggtacatcaatgtagcactgttgcggaacttatgactttcatcaatgataataaagccataatttttttcttggagtgttccaccaaaatcaccagaatcgcgactgtcgtcatcttcatcttcacacatttcatcttctgagacatttccgatacgtccagttgtaatgaagtcaatatatggcgcaatcttctcgtcagaatctttgtcgaacatggttatagtcttcttccaactcgattgaatggcaggaggagtaatgaccaaaactttacgttctcgtccatcgtcttccggcacggacaagaaacgcttgatgattagcataccaatgattgttttaccaagtcccactacgtctgccaacataaagcctccatgttcgtgcataatgctgatacatctctttactgcttctatttgatattccagtttatgaatgttcgccggtagataagtttctatctgttgtccaagcgatttatccacaatatcaccaaattttatttgtaataatttgatatataactcatacggagtaaatggtagtttttcatttttacgttctttttccacttcatctgtaataggtgcagatttaaggacttgttctaggaattgttcattccaaggctcagagatttcccatttctcattaaaccacaacagatgagatttattacctggtattgcatcaagcgataatacttgattgggcgctgtttcaatgtaatttaactcagcattgccttgcagccccttttgagtaaaatttgtgcttcccacaattcctatgcctataccgttttgcttaccatcgaagatataacatttggaatgtaggaactgcgtttcgtcattcgcattttttctaaacacgcgaatttgaatcttggaatcattgcttttagaacaataatcaaggagcagacgtatagcatctttatattcctcagtaacattaagttcgtggatatcagtttttatgaaatccagtggataattcgaatctttatatttaggtgactttaattgatttgcgtatatataagggtctttgcctataagtaaacgaagcgttgttccatctttttcaataaaagatctcaaacttttttgtagtatagctaaaccgggaatatcccaataaccagttgcaatactgactgtttgaatgccatcaatatctaaacattttctcaatgtcgctgtcattgaaagcgcttctatggaattatcaataagtgtattattcatatttggcaccttgtgtaatttgatgaatataaattaattgcgctctattgttttgaacttattaatagctctcgaatatcgacttctaatatttgagatattcttaataatgtttcaagacttggttgggaagtgtttgtgcaccatttggacacagtagcaggatctttctccaattgcttagctagccatttattggttcgctttttctccacaagcacaaccttaatgcggtttatgtctttttctttttccataaggattttctttcgttctatgcaaagataagaaagcctgtctatttttcatcatttcaataggactatttgcaataaaatttgcgaataagttcaatattatagctatttattgataacataatttctttttgggatagaaatctgtatctttgtaggtaacaatgttttgatatgggcaattgctgatagaaatagaaaaatagatattaattatatggaacaaataataacaacaacagttgtaactttaatatcaggagctatcggtgccataattggtacttatggcggagcgttatttgctgcaaaaagacaagaaaaacatataaaagaacttagacaagtcgctataaaagctttaaaaatattccaaaagtatgctcgtaatagacaaacttacgatgttgcagcttctgaattcaataatgcattaagtattgctgaaaaaagagtttttattgttgcattacataagttgggtatccctattctggcaactccagattctaagtttgacatacaaaatattgtatttgaaaaaagagaaatagataaagacgaaatagaagctattatcagccaaatacaattaggacattgtgatcagttattttacattgaacctgataattattttagtgaaaacattcgtttaaaaacattacgttatattgccaaaagatgggtaagagaagtttttggtaaaagcaaacttgatcgttctcagaatcctattgttatagtttatcctactaattggtggctaggttatacattaggggaaaggttaggaattgcggttttaagagaacgtatatctttagacgaatattttgatgaacaaggcttgcctaaggaagattctattgagcgtttaataacagacatagatcgtggtctatgggatagtagcttcttttgggatatagaaaattatcgaagcgtaactgcaacaagttctcttaataatatgatctctcaattattaaacaatagtcagaacagtacgattcagaaaaaagagagataaaagacaaaaagtttgtaaaaaaaggcaacagagaggattttcctctctgttacgaaaaaagttagacctctaactccttcaacggcaatccataattatattgtctgaaaagtcctctgtggataagtttcagaccaagggtctgataatacttgtagtcatcatcttcggtgcagaggtatttgtaaccatagcgcggagcgtactccttaaagaatcgggcaaggtctttcaggttttcctgctggtttcgtttgaagttactgcgtacaatgataatgctccagtcggggatgctgccaacaccacaactgtattcccagaaacgaatgtataaatccatttcgccaacatggacagaaacacaaatgccgttggcgttgtgcatgacggaacaacagtttctgtaaccgaatctctcacacaaataaagattgaaatcgtaaataaaatcggaataattcataataatttgaattttgatggttaataaaaaattgattatagactgaaacctcgcttgcgtttcggtttctttttcttctttttaagccggttggcctgtatcgcttcctccgtatcataatccgtaggagagggtgtgaacaatcccagactgatactggaatgattctcctgctggtattcatgccgaagttcctcgcgtatggtttctgcttgtgcctgacgctggttcatggtagcggaaagagcgttatatctcagctcttggtcgatgttcagaaaactgaattggcggtcaatcttggaaccgctaaaggtcagttggtcacatgtgaacttgacaccttgcatctctccagtcgtgcgacttagcttccattgcgtatcaattccgtacttccgtaaggccagtcgcagctcactccagcttcgggcgttcggaacctctcgttttaaggcatgatagataaaatactttaccttgtcatgacgacgtaaccgcataaaattgacatgctcttttccttcggcaaaatgcaaacggtaacgggctgtcagcatcttgcaaaccttttcgttccggtagcggtcgttcttgtcgctgatggtgcgtccgtcattatccacacggttgtaaacgatgtgacaatgcggatgatcacggtcagtatgccgggcgatgatgaactgcgtgttctcgattcccatcagtttcatatagtcgtgggcgatcttcagcatcagcccatcatcgtcacggatgcgctccccgtcttctgcggagaaactcaatgatatatggccgaccgtgttcttgaccttgtcattcagtaaagtctgcaactcgaattgctccgctatttcttcgggcgaaccgtagacaccaaccgctttcagcagtcgcgatttatcctctttcagcacatagtttacgcacccggaaaacgatgttcccttgacaattttacctatcatccttgagctgttttatgagttgtgaaatctgttgggcgacagtccggcactcatcagccacacgataaaaaccgtaagcgttggctcgttttgcaagctggttcaggttcgtgctttcgccaatcagttttcggataatgtcaagattttctctcgtaattcgttcgcgcaccgtaccgtgttcgatgagtgaacgcactacttcgctttgactgcgtttactgcgtcggctgagtgctctgagccagccgaactgttcgtctgtaagacggattgtaactgtatttttcttgtccataatatttgcttttgagattaataattgtgaccatcgggagctgtctcaccgtcttttgaggtgagcaagtggccgggaaatgtaatacaccggcataaacttgctccagtgaaaaagaagtgaatcagacatcagaaagtcatcgtttgaaaattcctttctaggaacgttgagccattgctgaaagaggtgttttctccacattgacaagctgcaaatcgaaagtatcgaccactgtttttagggctggattcaatgtgataagacgatttaaaatagcctccttagtttcttctctcagcagaaaatcggcaatgtcataacctgcatcccgttcttcttttgttgcgtttctttccataaaatcgaagagagaaacctctattcccaggctccggatcatctccattttactgttccaatagtcggtcgcacccagatcggggaagagcaggacacgtcggtttctcaatacgctcatggcatcccgattgaacgctccgttctttccgcccgaagcaatccatagatattgcggcagatagaagctggatatcaaagcgcttttctcactctccacaagggcaaccggacgttgctggtcagaggacaaaagatgctccccaaacaggcattgccggaggttgaaattctctttcttcaacagggaatgtacccatgtgatgtaattgtgcggctctttaatccgtctcccgttttcgggattgtagagcatcacttttccggtgcgtacccgtccggaaatatccacctgccagaagactgtagctcctggccaatgtttcgaggttcccacatggtagcgtaacatcaactcttcggtagcctcctgcccgaaatggaaactcaggaactgaaacagcttattcgtgtgatacaacttcagggactgcctcatgatttccggctcaatgaaggatggtgcaggaggcagactgatgcgtggctttgacatcggcacaaactcttcgttcaatcgctctttggcaatcggattctcgtcaaaatacattttgggcgtatagttgtagccgcatttctgttcatggttgcatcgccctacataattgggaaaactgatttgcttttccgtatcaatgtatttggcgaaacaacttttgcggtggcagttcgggcatgtatgccgggtgctgacacctttgtatggttctaatgtaaatctgtagttcatttttctttctgtttggatgttactatgcacattttcgcaacttcacaaacccctcggttgcgaaaatgtgcatagtaacaggtttatttactgtattctccatgattctcttttctgaataatgttccgatgtggcgttttagaaacatcttgaaagcatgttccttcatcccgtaactttcagcaatgccgataccttctgccgtagtaaacctctgaggcaggttcaggtagatgttgcggtgcaattcgctcaactgttcctggctgacggcagtctgcacttttactgctgtagttcggaaatactcagtcagcaggatggcacggttcacactttcaaggtcaatcgtatgcttgtcgcactctccgcaagtccatcgggcaagctggataatcagacaaaaccggataatgtagatttccagtttgcagtaaatacctaccaacgcatcattggtttccatatcacattggcgggcattttcatgctgccaaccgtaaagccgttgcttggcatcttcatcgaatggcaggcattgaggctgcaactcattattctcgtcatgcggacaatcctgtgcgatcagcttgtcgataatctgttgccactggatttccagttcttctggagtttcccggtcgttccatctgcttttcaagacagattcaggcatcacgaaaagaatacggtctatgaaaccgttactcgaacgttcgcccttgaccagttcacccaaaatcttcttttggatggtaccgataacagagatatagggacgtctgataaaaatggaactttgcgtactcttgcggtcggaaatcgtgggcttcgcattgaacaccgaaagccagaactgttcttccgaaccgttattgtaacggttgaagttcttgaaccaggccgacaactcgtccgaccaaaggcagagtcctcttggattctgggcatgtatcaggctcaatccttctggagtgatatccgaaacaagaaagcgtctgcgcacgggagcttgcggaaactcatccaaactggcttccatgcgttcctttttgctcatggacatagtgtgttcatactcggcatacagcttctgatactcctgattctgacaatagtcatgttcaatgaacggctggaaagcgaaactcagcggatgactcttattcgctccggggcgtccaatcagtgccatgtacagaatgggactttccagccagttgcgcttcacctgcaccaaatgggagttgccaatccccacggcaatggccgcaaggatagccgcagcaacataatccacgggatagccctgacaatcgtgcaaactgctgatgatacgctgaatcctgataggaaagacctctatcgggaactcaccgccagacatcttggctccgatgcgcacagcctcgccgataataccttctgctgttaatttggaggtttccatagccgtgcagatcaaaagttataacctccctttggtttgcgtttcgccccatgtactatctccgctgcctgttcttgaagcgacatggcctgcatttgcttgcgcccggactcaatccattgcagcaactcatcttcatagaagtagagttttttccctcgcttgtaagccggaatcagtcctttacgcgcaagcgtgtagatggtaggctttgccttacgtgtaattttacagacttcgtcaatttcaatgagacgatgcttgtcggaagaaagctgcggttgcagtgccgctaccatttgacggatttgttccatctgctctgtgagataacctaccgcctgcggcagcttatcaaaagtgatttgttcgtttgccatacgtactcgtttttaattgttcgctggcaaaggaaattggtgttttgatggtggaaaacatcaccggaatataactgtgagataacttttgatgatgattagtcgttatattataagtgttttattacttttgtacaatactaaaataatagaatatgaaagcaatacatgcagatcctaaagaaataagaaaaatattttctgagaaatatattattcctgattttcaacgtccttattcttgggaaaaagaacaatgtgataaattatgggaggaccttattgatttttatgagaatcaatcatctaaagatgataaatattttctaggtaatattgtcatacatccattaggtgatgctttttctgtaattgatggacagcagagattaaccacattattactgcttattaaagcatttcattcaaaagcaggtacggctgtcgtattagaagaatgtttaagaattaaagatccactaacatctaaattaacaaatgaattaagattagattcacatgtaattgaggatgataaaaagaacctttatgatattgtatttaataatggtgataatacatcagattgccatttaaaatctaattatgtagatctttgtcagaaaatagatgaatggtggaaattgaatgaatatagtgcagatcgtcttaatagcttaattttgtgctttttggatcaaattgtattattacctattcattgtggatcagaagatgatgcattaactatctttgaaaccataaataataggggaatgtccttaactgatgccgacatatttaaggctaagttacatcatgcttcaggaaatagtaaagatgaatttgtcaaagagtggaaatctcttgaagatcatgaatggctatttagaatattgatgcatatttttagggcaaaagagggggattcaactaaggaaataggattaagagcttattttacaaatagtacaaaaaatagattttccgattggaaatctgtaatgaatagcctaaaactgatttatgatatagaacaaaattgggcaccaaatgcacagattaatatattatggaatatattatatacataccctaattattattggaactttcccttatatgtatttttacataaatatggcgattttgatggcgaatcatttgaattgccagaagaacgcaatgatgagttccttcagttactagaatttactgtaaaatacttctttgtcaaaggggttgtatataattctgtcaactatgtcaaagatgctgtatttaaaacttgtgtagcaattgaagcagagaaagattatcttgaagagtattccaaagtatctaaagaggatattattagttttaatcaacgaattaagaataaacaatatggacgttatttacgtggattagtccttttggctgcatacttgaatccaaaacagaatatggatgattttgatgattttcttattgaaacacatcatatagaacacattcttcctaagaaatggaataattatgatgggtggaatgaagagacatggagtaacgatttgaattcattaggaaatcttattccgttagaatataggctgaatattaatgcaaaaaatgaattttttaatcgtaaaaaagattattatagagactcaaaagttcaagatgctcttgatttattatctctcaatgattggaatccttcaatattacatcaaatccaagatgaaaaagaaaaacgacttgaaagtttttttacttttaacaaatgataatcttttctagtcagtttaattacttcatctataaaattatgccatagacatttcttgttgaaatatgtaattgagcttaattttacattcagattctgtatgtgacatcttacgttcaatagttgcaatctccaaatcgcggagagtatgggcaaagacattcttgatgaaggtagcggtatgaatacgctttttaccaaaagccttaccaatattccaaccaaagtgcataatatcaatacttttaagttgagagtccacctttacaggcgatatcttttgcaaggtatcgcctgtgctatattctgcaacgtatgtgcatagacggttgagatcttcttcactcatatagggaaccattgtttgcttcgtataactgaggaccttttccaatctggtttgaatagcatgattctgttttgcgatagcgttggttcgcatgacttcatattctgaaggttcagagattgcttcttcagtggtaggagcaggctcaatgacatcaggcgtagcctggtttgaatctttgattgtagtggcttccggctcagaaacggtatcattgtgatttttcatcttttgaaaagcagagaaacgcaatagaaaagtttctatgcgtggcagcagaaactgattgaaagttgtctgtaaactggcatagatcgccatcaagacaattactgctgcaaaaaatgcaacaatactactgaaatcgtcaacgcctttggataaaacaaactgccgagctaaaacgccaacgacaagagtgcctaccaatacaagggaatagagtgctatatgttctatacttttctgattcatagtgatatttggtaattgtttgtgcgcaaatatatgtcatttcattaataccatactataaatccaagaaagtggcagcatttgtcctcgatatggtacttatttctatgccacctatgccacaatagaataaaaaagaagagtccaactaggttttagccccatgtcagactcttctttcgttacagaactttatactatttcagcgaaatcttattcgccgtctctcgcttcttggaattgaccaaatcagcatagatttgagtggtggtgacattcttatgcgtcagcatttttgatactgtgtaaatgtctgtacctaaagagatttggatgacggcgtatgaatgacgaaagcagtggaaagttatgtgttttctgattcctgcttcggcaatccattgtttcagaggatgatgagtcatggatcgggttaaacctttgaagacttttccggtgccccattcgccacacagttccagagcctcctgactgatggggagtgtagcctcggtttctgtcttttcggtgcagatacggatgtagtagccttgatctgggccgacctcaaaatcacgccagtccagcttcagaatatcactgatacggaggccggtcatgcaggcaaacaaggatgcctgtttcaagacaggaattttgcagggtgtagaggccagtttcttgacttcatcaagtgtcagatactctttcttgacttctttccattcgattttttccagaaagtcgttcaagttctcacgcagcatcttctctttgtaggctatcttcaacaaggcacggaatgtcgaataatagccggctgccgaattgcgtgagatgtaagcattggggtgattgatttgtttgcatttgagcaggtaatccctgaacttctcgcacagttccacggtgacatcgccaaaggtgcatttaccaccgacaaatttctcgaagtggttgtaaacgcaatcccatttctcatatttctcccgtgcctttgtccgaaagtaggcgaggaaatctaccttttgtttgttcttgtccaggaacccgaattcttcattgataagcgactggacacggatacagcggattgcctctgccttgttcagcatatcctgattgaacattctttgctgctcgttcttgggcttggcatagatgtagatgccgaggaattcccggcgactcatcttcatcgtgtaaggattgcggatggccggataataatccagataaagagatatgcggtcgttacgcaatggtttttgtctcaaagttacgttggtgcatgtaagtgtcatagctatattgttttttgattaatacttgtttttgttgcaaataaaataggtgttctaatggtggtctttatcaccggaaaataacttttggctcattctatctttggaggttcaaagaacttgtccaactctgcccgcaggatcttggtatatttaccgaccttgatacggggaatattatggtatttcacatagtggtagagttgatcccgcgtcaaattgaatcgctccatcgcttcggcaatggtgtagtatttgggctcttcgggagctatgagacctttggcaatgtccacatgctttttggagtagaacaccatgatgccgactttctttttgggaatagcattctttgatacaaaagaatagatggctgtcagtgtcataccgaacttctcctgcatgtcttgcgtgctgtaccattccttgatttcaggatcgggagctttctttgcaaagtagtcatcaatatgctttttgctccaataggttttcccacgatgaaaggttcgtggaatattatgttccttagcaatatggaatatccaggaatcttttacgccatacttctccttgacttcggctgtggtgtagaaatcattaatggaaggtttatctctgactggaatcttaaattctatgggcttattgaataagttatcaatatcctccttttttaatagaaatttatatccaagtctggtggctttaagttcaccccttttcagatagccataaagagtaggtcgggttactccaatgtatgtggcagcttctgtgatagtaagaataggcttgtctctgatcttctcaatcggcttttccttgatgactttttcgacaacctggttgttagctttaatggaagcttcacgtttcttctgtttatacagaaggtttgcacatctgtgcgaacaacaggttgtagtcgttttatgcgcaatgaattcttgcttgcaccacgcacagattcgtctgatttcaatgttgctactcatgttatttctccttatttctccaatatttttgtataactccgtaaaatcccgtaaaatggtgtaaaagttttccacgaccttgccaacgataatcctcggattttcgtggtgaggtacacaggaggtacaaaaaatggcgtaaaaaggcttagcaacgattatcaacgatacttaagcaacaaaaaaggcgcccgtaaagagcgccatattaatcgattataatcaatttaactatttgataatcagtaatttacttaccgatgcaaaagtgctgaaatatattctgtaataccatatcatttgtcacttctcccgcaatatcgctcaagtggaaaatacattcccgaatatcttgtgatatgaaatcaccggaaatattattagtcagaccctcttgcactcgatggatagcttctaatgcattgtttaatgcctcataatggcgtacattagtaactataacatcattttgcgtaattgtaggaagatgggcagatgttatcagcattcgttgaagttcttcgatatgttctcttttttttgcggatagggtgattgactgtacattatcaggaaaattgtcaggaatactattctgtatattatccactaaatcggctttgttataaacaaggataagctgctttctttcacaacggggaaggagttgaccggccaactgtgttatttgagcttgggcattcgtagcatcaatcatccaaaggacaatttctgcttgatccaacttttggaaagtgcgttcgataccgaggctttcaattgtatcgctagtttcacgaatacctgctgtgtcgatgaatctgaaagtaatgccacctatattgacagtatcttctattatatcccgtgtagtgccatgaatatcgctaacaatagctttgtcttcattaagtaagacattgagcaatgtagactttcctgcattcgtttcaccgataatggctacaggaacgccgtttttgatggcgttacctacgttgaatgaattaaccaaacgagctatgactttctctatgttgttcgctagttggcaaagttcggagcggtcggcaaattccagttcctcgtgatcgctgaaatccaattccaattcgatgagtgaggtgaaatggagtaattggtcacgtaaggtagcaagttccttactgaaaccgccccgcatttggctcatggcaagacggtgggtcgctgcagacgatgaggcaatcagatcggcaactgcttctgcttgactcaggtccattttcccatttagaaatgcacgctgggtatattcgcctggggcagccatgcgacaaccattcttgatgagtagttgtaatactttctgaagaatataggcagaaccgtggcaagtgatttccgtactgttctcaccagtataggagtgaggagcacgaaacagactaacgagtacttcatctataacttcagagccgtcataaatccgtccaaaagtaagtgtgtaaggcttgctgtcccctaactctctattagtagcggcaggagtaaaaatacaagatgtgatttcgatagcttccggtccggaaacgcgaatacatccaatagccccgccctgggcggtagctatggcgcagatagtatcttggttcattatttacagcttgttttatgacgcaaagatagtgctttctcctgattttatatccgataagatatttaaatacgttcgagtactttaagaataagatggtcaattgtatttttatatccggtgttggcttctttaattaatcggttggcaattaccatgcagacagtcatggctttatgccccatcaaacgactgaggccggccagtgcggaactttccatttcgaaattggtaatcttataaccgttgtattcgaattgctcgattttttcgttctgatgcgggtctgccaggggaacacgcagttcacgtccttgcggaccgaagaaaccgccggcggcgatggtgacgcctcgtaccatatcatctcccgctatacggtctatcaattcggcattgacatcaattacgtaaggggcgggagcacacatgtttcccgaccatcccatgtggttgaggaaagcgcgttcaaagggcaggtcgcaaactgcattacgtccggcatagaagttcagcaagccgtcgaaaccaatggatttggcagaacatataaaagttcctacgggcgtgtaaggttgcaaaccgccacacgtaccgatacggaccagttccaattgacgcagttggggcttttcctctctcgtctggaagtcgatgttagcgagtgcgtccaattcgttcataacaatatcaatgttatcgcaaccgataccagtggaaacaacggtgattcgtttacctttataagtacctgtaattgtcttgaattcgcggctctccacttcacattctttattctcgaaatgtgaagcaaccaatgctacccggccggggtcacctacgaggattactttatctgccagccattcaggctttacgtgtaaatggaacacggaaccgtcttcgttaataataagttctgaagatgcaaaatactttttcatgttacgaggtattataagttcgtttatataggtaactttaccggtttatttgcttaatggctggttggatgtaccggttaccggtttggcaatgttctcgcgcatcgaagtgtcggcctcgatgtttttcatccggtaataatccatgatgcccagattgccgctgcggaaagcttctgccatagccttaggtacttcagcttcggcttcgataactttagcgcgtgcttcctgtgctttggctttcatttcctgctcgctggcaacggccatggcacggcgctcttcggcttttgcttgagcgatatttttgtccgcatttgcttggtctatctgtaaagctgcaccgatgttcttgcctatgtcgatgtcggcaatatcaatagacaggatctcaaaagccgtaccggcatccaatcctttgcgaagcactaatttggaaatggagtcgggattttccaaaaccgatttatggttttcggaagaaccgatagacgatacgataccttcacctacacgggcaaggattgtatcttctccagcaccacctaccaactgacggatattggcacgtacggttacacgggctttggcaatcaactggataccgtcttttgccacggctgtgacgggcggggtatcaatcacctttgggtttactgacatttggactgcctcaaacacatcgcgtccggcaaggtcaatggcggtggccatttgaaaaggcaattcgatgttggctttcgaagcggataccaaagcatgcactactttctcaacgtgtccgcccgccagatagtgtgcctccagttcatcgcgggtgatgttgctcaagccggctttatgtgcttcaatcaggccaggcacaataatatagggcggcacgttacgaatacgcatcagaaacagttgaaccagtgatatgttgactcctgagactttggcagacagccataggaaaaacggtacatagtggaaaaatagtaccaggaaaatgataccgcctatgatagtgaaggcagtgagatacattgtgcttggatccatgattttagttattaatgattacttatttaatgatttgcaatttacggtttgtttttctccacaagtatcactccgtctgtaatgcggtttactataatgggagttttctcattcagaaagccgtctgtggattttacttctacgatatcaccatttatttcggcatacccgatgagggcaagacgggtagtggtaatgccggtatcgccaatttttactttctcttcggcactacggtctacttttgaagtgatgtttttcttcaaagctatcttatccagggttttggaatgcatgaaccacactaatgaaccaacgcaggtgatgacggatatggcaagtgtgatgaatccggctgttgctcctaaattggcaaaagcgtagtagttggcataaatgatgcaaccacctgccaaaaatccggcaatgctgatgcctggtatgatgaatagctctacgaggaacagtataactgctgcaacgactaaaattgcgatgatgaatatgtccataactgttctatttaatggtttgcttttctaatttccgcacttggatagcagtacggtctacttcgtttgccaactgtagcactcgtttttccaaatcgagtatagctggagccattttgcttctttcgttctggttggcacgcgaatattgggtgcgcatattttccagtttattttgttgctggttatagctttctttcagttggagatagttcctgaattgcgcttttgcttgcggagagcggaaatcggcagcataatgatagatattcctgtcatcaattacaaactcaaattcgtgtcgtttctttatttccgttttttcctgcatcgtttcctgcaggcgtttccttgcatcggctaccaggctttcattcgtccaggtatctctgatggaatggagttgggcaagctttatcagtttgtttttatccatgctttcatagttgtatacttgtttggatgaggcaggaatgaatacatatacacatactttgccttccggctgataacgatctgatgcaaaccagccgaggttgttgaattcgtctataacgtacatataatcattataaggcgaattgaaaggcatgcctacattttccggggtcagataagtgtctgtgtttgtattgtagcgtgttacgaaaatatcgtatccacccattgatgcaggaccatctgctgcataatagatagtgatgccatcagccaatacgtatggataactggcattcatggactcgttgatactgccggggagcatattgcctttgccccattcgttcatcattttattgcgcgataagatgttgagcgtactgtctttctgtaactcgctataatagattttattccctaactccgtttcatatacagtgccgcctttgctattggaattttcaaagtaggtatcgtacatgaacaatttcccggattcaggactgattttgtacgcttcgagaaaatctttcttgtctacgacaaaactgtcgatgaagcacacttcttctacgcctttcagcagacggaggttggctttgctcttttccagaagttttttggcttcagcggtcgaacgtcttctttttgtcagttctgcaatatagtcttcgtaagtgccgacggcatcttcaaatcggtaaacggcattataagcctgtgccaaatagagttgtccgctggtgacccggcgttttacggctgtttccagatactttatagcttcttccgcttctcccgtattcagacaacatacgccataccacaaattataattcccgttattaggttgtgattttacaaatttcttaaaaacgggctttgcctgttcgtattgtcctttttcatagagtatttttgcttgggcaagggtttgtgctgaagcatgtattccaaagaagccaaacaagaaaagcagtatatatttattcttcatactaaaaaatcttttttaatgagttcaaaaatacgaattaatccggaataaagctcttttccgtaattctattatgttaattcttctttaaatgattcttttcagttacttttgcagccaattttcaactgatttttatggcactatttacagaggaagagaagacattacggcgtatagagaaacgctttgccaaaggagtggtggagtacggactgatagaagagggcgataaaatccttatcggactttccggcggcaaggactctttggcgttggtggaactgttggcgcgccgttcccggattctgaagccacggttttcggtggttgctgcccatgtggtaatgagaaacatcccttatcagagcgatacggattacctcagaagctatgcggagtcgcagggagtgcctttcgtgctgtacgaaacggagttcgatgcgagtacggatacccgcaagtctccttgtttcctgtgttcgtggaaccggcgcaaggctttgttcactgtggcaaaggaacaggggtgtaacaaaatagccttggggcatcacatggatgatattctggaaacgctgctgatgaatattacgtatcagggggcgttcggttcgatgccaccgcggctggtaatgaagaagttcgacatgacgattattcgcccgatgtgtcttgtgcacgaatcagatttggcggaattggcggcgataagaaactatcggaagcaggtgaagaattgtccttacgagtcgcagtcgagccggagcgtgatgaaaggtatcctgcatcgtctggaagagatgaatcccgaagcccggtacagtttgtgggggagcatgagcaatgtgcaggaagagttgctgccccggaagaatgaaggcgggataagctgctgacaagtaatttctaatcactaatcattatatgaaagctttttacaccattttacttttaattgtatccaatgtcttcatgacattcgcttggtatgggcatttgaaaatgaagcaagaatttagctggtttgcttctttgcctcttatcggagttattatatttagttgggcaatcgctttttttgagaataatgcaataaaaagtcccctgttattaaatagttataaataattgataataaataaaatagcttatgaaatcattttatacaataggattgttaattatttctaatatatttatgacctttgcctggtacggtcatttgaagttgaaacaagaatcttcttggtttgcttctttacccttaataggagtggtaactttcagttggtcaattgctttttttgaatatctttttcaaattccagctaatcgtattggatttatagataatggtggtcctttttctttaatgcagttaaagataattcaagaagtgataacccttattatctttacggtatttactactgtactatttaaaggagaatcattacattggaatcatattgcagcattcgtatgtttgatattggctgtgtattttgtatttatgaaatagttgtaagataattctttattctgtttttatattgcgatacttattgaatgtaacttaactaccacttctggaaataaaaaatccaactagcagaaatgctaattggattttccagttctaggttatatcttctcacttaaaccatattttcgcgtttttctttatctccacctttgtgaatttttccagttccttcacaagtgctttcacttcatctgctgttggttctggtaactctacttttctgttggtattccgtcctatattgacttgcttcggattacatcgccttatgtactttaccattttatccaaatcaaactgcatcaacggttctgccgtaacataggtatctatacccgaatccgcaatctttttcattgcccgtaccctttcctctatctctggtgaattgcacatcacatctggataagacctattagtttctatggtcgtacaaaccactgaatggtgcaatacagggtgagttataaaatccaatattctggaaggattcttactctgaaacagatatttgttggcagacttatcgcaatagtccaaaacgatttttatccagtggcttggtatgtcttttgcccacatatcaatactgcttcctacaaaaataaagttcgagcattcaagatagctggttaattcagccgcatccagtctgggagccttcaaatgggtacacatctttttcatataacaataggtgcaaccatgaaaacatttacccttaataggattccatgtgtgtgtcacgaactcatacatattgcctttactctctttaatcataatatatatcatttaatagttattactcttgttagggagccagcaggtaatacccactggcttttttctcaaaggactatctttcaaatccattccataattcagtcaatttcagattgataagattttcctttgtatctccgcctgttttacccttagcttttttgatatagtctgcatcctctttgctgatacttctgaggaaacgttccattttgtcagtgaaatcgggttttctcttatcgccagtagtgttatacttggatattatccagtcaattaaatatctactttttatgtttttctctgtgaaatgttcttttgccgcttctattaatctttgccctctttccaaacctacggtattctctaactgtgggagaataatattgtccatagcgcaattcataacctttttatcaatatttgcagtaaaggtcagccacttcgatgctacggacaaattatatccttcatttactaaatcatttatagcatccaacaaaggcagttctttttgcagattgttcatcttcgctcctttcacaaagtctccacctttccatggattagtggcaatattgatttctgataacatcttagctattgtgacttccacattcaaagcatacattatataaaactcacctgcgtagttctcatttttatttaaaagctcacagtgtgcctcatagcgatgattaccttccagcagcaccaaataattcacagcttcttcctttcctacaacattgcctgtgacaaaatcaacgacttccattccctgattgatagcatcagtagcatctaccactatagcaggtattaactgtccgtattgttccagtgacttcatcttagccttcacaatcttttcattcaaatcacgattaccacttaaacgtgcaatcttctttccttcatttactaacgaagttaatgtaacaatttcaaatcttttcatacaattttgccgctgccctgcggacttatttgggtatctggctcaccgatttattttatactgcaaagattaccctttaatcggagagctaacaggaacaaaaaaacgcacaaatactgttcccctacaagaaacatctatcaatcaatgttttccatgtcgtagaatcagaaaaccagacaagaaaaaatcctgtttatctgtttatggacttctaataaaaacagacaaacaggattgttcctaatgtggaaagttattccttaaagatagaatgagttcagcttctttatctctgtatccttatatctctttaagatagcctttagatattcatcgctttccctcacgctctcattgcttatgatgccagtaaggtacagggaatgggagataaccattttctccttatccgaaaggtttgcccctttcttccttttatctttcaaatgctcctgatggttaaaggcggaaattatcatcttagaaaaatagtaagccaatacggaaacggaatcagaactttgacgggttaaatccacgaagtgcccgttggataaatctgtcaaatcgttattttccaatccgtcgtcacagaatttggcaatacaggctatggcattattgttatcaatcacgatatttttcctgcctatcttcaaagttaggcttattggctcattgaaaatagccccaagcatgccactgcctgcataattgctatagattacgtctacaaagtctcttatgtgctcaacaggaaatttgtttatttcaatccctttcatgcaaatcccccaactatagtcatagcaaaagagcaacagataccagaacttcccactatccaaatccaatgcttgcagatagccttgcagttctttatcctgcatatattcctctactgtgaatttatgccgtaatttacgtgtattataccttcctttaaaaatatccggagcttgcgaaactgccatgtaggattcacctgtatcttcattatagtcaaagtctggtgcatactcttgcgccactggatagatataatcaagaaggctatattcttcctcgttatattgaaatgagaaattttctattggctttaccattgctttttatttgcaatgataataaaaaaacagcaaatgaattgcttcaaatgctgtctttctattttatttattcttcaataatagttccgaactttccccatatagagtgattttgatatgcttccttactacctattggaacatataaagtagcatcagcatatactgaaaaggtatcttctaaaatagcaggtggatttggattttttatatgtacttcttttaatgctgtgcatccataaaaacatttactttctgtattccaataattaccaaattgtgtgactttacttggtattgttattgaagtaagatttatacaattcatgtatttacaaccgattattactcaatattttatagataataagtcagaaatatggttgttatttttaattgcacattctaaaaggtgaagatttaacgcttttattgattattaactcaaaaaggacatcaacttgggtcgtttcttctcttttccttgctattcgtttccgatattccacttttgttttggtctatctcatatgtactgcaaaggtattgatttttgtttgatattgctccttgcttgctccttgtcgtagattaattttcacacaggaatttttgttctctttctataggggcttgaaacaatccatttattggaaacaattaaagacggagctggtttgccccagtgctttttaagaaacagggcaattattttatctccacaaaggctcttgttcccaattatgaggaaagcctaataaacgagttcttactgatgggtatttcgataaaagctgcttgaaatctgcaacaaaagtgttgcccatagaaatggagttaagccaatacaccacatagcagagttgcggataaagtgtttgttcacggaacgagaaatccgtaatccatgtgtttggcatacgcataggcatcattggcttgacaggaaagacccgatttgacagtcttgaatgatgggcgcagcaattacgaagtacgggtctgggtacggattaaaaggctaagtgattatttccagtcatttagcctttttaattatctaatttttccccacattttccccacagctgtctatttatatatttttatatattttagaaacatatttttccgtaaagttatgtacctttgtcggcaaataaagatattctcgtcaaacaaatataaataatataaacatggaaaaaaacagaaaaaaacaaatcgtagttttgagtatagctttagtttgcattttcatcttggtattttcattgttccataaatcagcgacaaaagatagcgcaaatcctcctttaacaaatgttttgactgatagcatttctcaaattgtctcagcttgtcctggcgaaattggtgtggcggttattgttaataacagagatacggttaaggtcaataataagagtgtttatcctatgatgagtgtgtttaaggttcatcaggcattagctctttgtaatgactttgacaataaaggaatttcacttgataccttagtaaatataaatagggataaacttgacccaaagacttggagtcctatgctgaaagattattcagggccagtcatatcattgacagtgagagatttgctgcgttatactcttactcagagtgacaacaatgcaagcaaccttatgtttaaggatatggttaatgtcgctcaaacagatagttttatagccacactcattcctcgttcaagttttcagatagcttatacggaagaggaaatgtcggctgaccataacaaggcttactctaactatacatctcctcttggtgctgcaatgttgatgaatcgtttgtttactgaaggtcttatcgatgatgagaaacaaagtttcattaagaatacgttaaaagaatgcaaaacaggtgtagataggatagcagctccacttcttgataaagaaggggttgttatagcgcataagacaggttcaggtaatgttaatgaaaatggtgttcttgcagctcacaatgatgttgcctatatatgtctgcctaataatatcagttataccttagcggtatttgttaaggatttcaagggaaatgaatcacaagcgtcacaatatgttgcgcatatatcagctgtagtatattctttattaatgcaaacttcagtaaaatcttaaactgcacttgctttgataattaatgataaacaatctaaaagcactctaatcgttatcggagtgcttttagattactaatcaaattgcttctattataatttgaatcctctactttttctttcttcctgttgcggcactcttgctccatatctaagcctgtgccattgctccctgaaccagtcggcaatcggcttcctgtttattgtcaggttcagcctgctttcatcgtcagggtcattttccacccttaaaatatcatcctttatatcaaagttccgcctgtgttgctcggaatagattttaccgctacatttcagggcttcttttttgactataagactttcagtcatttctttagagaatcccagcatggcacaaaacttttccatgcgcagcatttccctgaacatcggaaaccacctgaaagccttgtctatgattctggcgagccgtgacagttctttttctttcatgtcaagttcctgcctgtgcatttctctgagattgtggatttgcgtatcatgctgtttctgcatctgctgtacttggctctgcaatttttcaatattggtgttccgttttgaaacctcgtcttgcagtttttcgttggcacgttccagttctttcagttttccactcccgaaaagagaagcaactccactagttatggctgtcgctgccgtggtggctgtcttctttaacttgtcagtgcgtatttctgatttcacctgtttcagttcctgctcggcaagatttatctgttcttctttgtgccgtttggctgcatccatgcgttgcagttcagctttctgcttctcaatgataaagtcgttccgttccagatgctccttaccagtgacagcctttgactgcccgcgttccatcagcaggatgtcggatgcaagggtctgcatctgcatcatgtcatcgtcattgagctttcggctctttcctgtttcgtggttcatccagtcgaaaacgatatgggcatgatagttcggcttgaaccatctgtccccgactttgaagctttccctgtcttccgcttccggctgaccgttcagccaatgcccttcatccttgtgcaggaagatttgcagcggtgtgattccccagcgtctttgacactcctcaccgaatttacgcacgtctgccagtgtggtgtccgacctgacaagcagcactccttcacgtatgggggagcatcccgcaatcttgactattttaccgttcttgcctttgcgttcacgctccttttcctgcatggcacgtccggtcttttcctttaccatctgtctgatattgtcataatgcatccgcaaatccggactgccgaagtcgggatttatccactgttcgttatcggtggatagttcaggaacgacatagattctggactctccgatgtggcgcatgtattcggcagtcctcctgttgtgagcctcgctcgatgcgatgttgcagggcttgatatgtatgcttgattttgttgccatagatacttgttttttggtttgtactttattgtttgcttttccgctgtccgtaaacgcatggggttcttaggggtgcaacccataagcggagattgcaaagagagggtcactctttgctctgggttctcaggggagaaacgccctgagtgggtcattagggtaaaaccctaatcccctcgggagagcccacaactacgtaagcggagcgtgtagttatagtgggctatatcaatggcaagccattgtctgcaaactccagcctacggcttccgctctcctccgtcagggaggtttttcatcatcgttgccgattggagatgcaccgaccagcacaaggtctaaatcgtctatcagtttttgcaggacgggattcttctctatcatccgctggaggattctctcagcctcgaccaagtggttggctgtactcatcaccttgccctcccgtatctgaaagataatccaatcggctatgtcgatatgggcttctttttgtttcggggtggcattcctttcgatgatgtccgaaaccaccaccttacaaaagtacatgctctcggctcgctgtttccactcggcataagcatcggcatcgggaaagagaagcacggttcgccctgacagtacacggagtttctcttctctcatctgactcttaccacccgtagccagccatacataatcggggaagatagcagaaccgataacggcactcttctcggattccaccaagaccaccaccttgtcgggatgcgttttcaacaagtgttccccgaaaaggcattgggatagttgccaatcctctgccaacacacgctgctttttcaatatgctgtgtatccagttcactgccgatgtctgtcctcccttgatacggtgtccgtcttcgggattgtactgcatcacctttcccgtgcgtaccttgcccgtcctgtctatctgccaaaagataacagagccgtcacgggtagcccccaaacggtattcctccaacaaccgcttcaacacctctttcgccttgtcgccatagtaggaagtaaggagtgtgaagaggaaacggaagaaattgctacgctcgctttgcgacttctccacatagtgagggggaatatagccgatggctgtcggcttactttgctgcttcactttcttctgctctgctctttgcctgtcaaaagagaaatcattggtagttctgtgttcaggatgctcttgaaaatactctttcggagtgtagtgatacccacaaccgctttcgtggttacatctgccgaccgatggatgcaacggcacattattttcgtccacgtaatagacgaaagaatgcctgtctccgcatttggggcaggtatgccgtgttgccgttcctttatacttctgtaatgaataattgcccatagcttagtccgtttttgatggttgattgtcggctgtcccatcctgtcccattgtcccacactctaagggttgggacagtgggacacttgggacacctgcgtttttactctctttgctgcgctggatgatacggtttacggtggacttgccacaattcacctgtgaggctatctccctgacggacttgcccgattgggagagttgcagaatttggcaatccctttggcttgattcattgtcgcccaattttttcaagtgttccttttccgtggaatagcccctgaacacgaactgcaagaaagcatccaccttgtcaatctcgtaaacgattacattatccgcatcatgagagaacgtgccatagcgcactttaagctgcttcacatagcgaagccctccgtcttgggcactttttccaatggtgaacacgctgtcaaagaaattgtagagccgtttgcttccggcaaggtcgttggatgtgatgggacaatccaaagagcgtttgggcgtatgtgctaggacaaggatagagagcgcatatctctttttgagattgttcagctgaatcatcagccgtcctgcggcatcgcctttctccatggcgcaacacaggtaggtaagattgtcaatgatgaaaatcttgcagtcggtctgcacagccatctgttcaatgccgcctatgatagcttcctcaaagttggcatccaaaagctggttgcagtcaatagacacccgatagagtttgtcgggaaaggtgtagagctctccatgctcgttggtatagcggagctggaactgcttttcggacagttcaaagtccagatacagcacattgtcggttcgggcgatgcggtcggctatctgcacggcaaggatggacttgcccacgttggaatcggcaaacaagcaggagagttccccctcgtaccaaaagctgtcccacagcgcacggggcgtaggcaataacgatgcttcaagaatggtttggtttgccgtcttgatattcatcatgcctacactgtcgggcataccgttatgcgcttgggatgcttttgtgaggtcgccacgtatcaggttgatatagttcttatcctcttccatatcattcaccagttacgtgggttgggcttgcgacggtgggaagaggataaggacttgttcagttcctcgtctgacaacggtatgggattctttcgggcggtttccagccacttgtccagttcgtcacggtaaaggcaatagcgtttgccgggcttggtggcagggattgtcccttctgacagtttcatgtagagcgtacccttagggatacctaaatactctgctgcctcgtccacagacatgggcacgtgggtgtccaccgttttggcattgttcacactgcgctgctcggcgagcaggcttttcaggctcatcacttcgtctcgaagctgagcgacaacctcggggaggtcgttgaaggtaagaattgatttttccattcgcgtactcgtctcttttgtaagacttggcgcaaaggactgaaatgatatatccgtgaatatctccacgacacgtcattgcaaaataattcccgaataattaagcccagccataaatgacgggtaaaattactcgggaaacgatgtaaaacaggcggttatgagttaccggatggttgtcgttggtgtcgtgattatcctaattccgcacataatcctcgggatagtggaaatcaagtttgccgttttcgggttcatcaatgggaatttccgtctttaacggctctaccttgaaattcttgatggttgataagtctgtatcagcaaacgatttcgggaaaagggctttgatgaacttggcacggttatccccattgtagtatctcttgtacaggaaacgctcagagatattccatacgaagtgacggagtggaatgttgttgatgtctttggtaaacggtctttgtatgggcttcggggtataagtgttaagattcatccatttgtccacctcagtacagatgtggttcacggtttcttggtcggcaatgcgaggcaggtaataatggcaatactccatgaccatgcggatgcgctcttccttttcccgttgctctctgcttgcgtaattggcacggttcttttcgtgaagatccggggcgatagtaagctctatcggttgtgtttggataagtgtctcttcttttgtcggggatgattcgggtacaggctcagggactgatgtaggtccaggcacagatgtggcttcttcaagtgtattttgtgacagttcttcctgcacctctatggcttcggcaatcgtttctttcttgccgaacttgattttgtagatttcgtatgtatcaaagataagtgtctgaaaggagagatagagcaaccatcccaacaggttacagcatacgaatactatccacctgacaaagttgtcttggttgaagctgtccgctattaccagcgtggcaatggaagatattaggacgatggcgaagccgacaaagcccaagatgatgtatttgtccttgattgatgattccatatttcgttgagagattgaatgttcctgtattattttgtgcaaagttaatgctatttttcccaattactgcccgttatttgcggttagaacggtctttttcaatgtatttcacgaaatgtcatcatatcatactctgtttcatactctgaggggcttataaatggtggcatcaagccaaaaacatagaggggcgattatagccttgtagccataaccgcccctctgaatacctgtcaatgtgagacatttatgcctccttgcgtttcaaggttatcttgtccaccacctgacacatctgctgcgctgctatcttggaatagatttgtgtggtggtaatgttcttatgtccgagataggcttggatgacagccatgtccgttcccatttccacgtgcaggcttccgaagctgtggcgggtacagtgaaaggtgattttcttggttatccctgctgccgtgagccaccgttggagtggtccttgcagcatcttgtccttgaaatcctcaaagataagtccctcgccccgttctcccagcagtccataggcttcatcactgatggggttatgcactatttctttggttttctgcatacgggtggtaacgaacatcctgccgttggtgtatggttgtatctgctgccacgtgagctgtctgatgtcgctctttctcagtcccgtaagacaggcgaaaagaaaagcttttttcaagacctcctcctcacagggtgtttcggcaagccgtatcagttcctcttggctcaaatgctccctgatggtgggaatgcactcgatgcggtctaagaagccgtttgggttctcctttatcttcctgtcacggtaagcggtgtgcagcacggcacggaaagttgaccaatagcctgctgcggagttgatgtgcagcttttggttggtgtggatggattggggtgcatcaagcaggtattccatgaacttgcggcacaaatccacatccacctcctcaaaggtgcatttgccgttcacgaaccgctggaaatgcttgtatacgtgctgccacttgatattcttgcggtcagccagtcctttgaaataggcaaggaaatcgcccttcatcttggtcttgtcaaaaaagccgttgttttcattgaaaatggcttcgtagcgctggttgcgcaggatgaccgctttcttcatcatgcgtgcgttgaagtcccgttcctgctggtttgcaggtttggcgaagatgtaaattcctaaggcttcacgtgtaatcactctcatggtgacattgtcacggtagccgggatagtagtcaaggcatagtgaatactgtgtcccgttcttaatcttgcgcttacgcaaggtaactgttttgcatttactcataataattatgttttaattggttgtatacattttggagttgtatccatgtttccgatggcaaaggaacaacgtgaaatatccgtgaatacctccacgatacatcattttgaaataattttcgataatcccgatttttcacggttatttgttcctttcagccatgacacgctccacatctgagcgcaaaagcaggtttttcacacccacctttatcttttcgatgtgcttcaccttgacgatatggcagatgttggctgacgaaagaccatagatttgctgcacctgctcaacggtatagtagcgttcatcgttcacaaggtcagttctgcggagttcgttcaaatgtgatttggagtaataggtacgcccgtactctcttttagtgggtatcttatggcgataggtgtaggcacggagtgcggtcggcttcatgccgaacagttcctccacctcctcggtcagtagccagtcggtaatttcgctaatatcaactgccacaccgaaaaactcgtcaatatgcttcttgctgtaatagttctttcctgcgatacggcagatggggatatggttacgcttggcggaagtgtaaagccatgactgctttaccttaaaaagggacatcacctcctcgcccgaatagaagtccaacacttcttcgctttccttttcccttttttctcttttggcaggtaaggaagatgaagatgatttccttggtgtggaggtgttgccgggcaggatgcggtgatagggattgccctccaacatctgctcgatgtcggctctgcggatgaatgccatgcggttgctgatgcgtgaggctttcagcttgccgatggctacaagtttgtaaatgtactgtcgggaacagcccatgaggatggctgctttggaaaaggtgagatactcctgatgctgtatctccatcaagggttgggcgactttgaagaggttgttcttctgcatcactctggctcgtttggcttctgcctgacaagcctcactgcaatatctttgcataccgcttcgggttacaaaggacttgccgcaaaaactgcattttctggttgctttcataccgttttatcgtttaatggttcatttcttcaatcctatatctctgaaatggtaaacggatgtgaacggaagtcaaccattgtcgcttttctacacagtgtgactgtttccgcatatcggggcggttattgtcgcttgtcgtaaacggttgtaaacccttgtcaactgtctgcacggtgtgacaaaaaacaagccccgcaaattctccacgtcagaaatacgtctcaaaaatatgtggaaatttgggaagcgacaaatggcaaccgaaaagtgttaaattttagaatatgctggtaattaaagatttacactcggatatttctgattagttttggttgttctatggttataaatacaacaatagaaagcagattttccaatcgtatcaacactacttggtatatcaatatggcataaacttgtacaatccctaaaagcatactcatcaattaaggtaataccattagccatcttaatggactctaaatttgtacattccaaaaaagcctgttctttaattgccgtaacactacctggaatacttacagatattaaatttgtacaatccccaaaagtcaactctccaattgttgtgaccccattaggtatatcaatggatattctatttttccatttgtaaaatgcctttctttctatttcaacaatactattcggtagttttatctcttccaggtatttcagatgctcaaagaaccccataggaaatacattatcttctatttcaacccctgtttcacctgctgtaaaccaataatcatccccaccactgacaatatttacatctgacaaatctattttcaccaaattcttcatgtatctgataaatttaatatctattccattgataaatcctgacaatgtcagttctttgacggctttagactcttctcctgacattaaggttggcaaagtaccagccgtttcaatatgtaattttttagttgtatccatataggattgtgtcacgttcaatttgatttcagatatgtggctttggtctgatgcactctccaacagaatggttatcttagtgcttctatcaacttccttattcctgtctatttttatcctcaatgaatttactcccgctttgccatttataggagttatgctacaccactctttggcattttcatcactgaaagaaactttagcattccaatccatatttgtggcaaaggatatacccagttctttcccctctgcccctatgctaacttcattattgacaaggttctcactctctgctgacaaggcaaattcaaggtctttgtccgctggcttctcaacttcttcgggtgcttcggttattgactgtaaactgtcatcaccgcatgaaatcattcccatgctcataaaggctgtcattgcagccattccaataaatttaaatgtacgcataatcttattttaaatcagtattatctgttgaaaaattattactctgcaaatatattaattaaatttgatttacatacaaagtatattttgataaaaaaaactaactatctaataatacgctacattagagttatataaaccgaacagtggactatctgcctcttgacaatcttgcatgataatccactgcttttgaatggtttattttataaattggcttcttatcctttggactgttgaaacacctataccctgtaatttggcaatgttccttactgaatagcctttctttagtaaagctatcgtttccctgtattcttcccttttcctttcctctgtcttgatacttccagccttacgacctaatttcccacctttggcaatgtagtttgccctgccactgttcaaacggtattgtatgtttgcccgttctatgttagccatttcagcaagtacagttaccataatcgaagcaatcggatttacctctccgtttggctgcaatgtgtataaccctaaattctgtatataaacggatacctttgcttcatgcagtatctccaaagagcgaagcacctgtaacgtacttcttcccaatcttgaaagttctgataataacagatagtcaacacccttttccgtacagtattccaaacattctgcaagaacctgcctttcctcaatcttctttgctccgcttatgtgttcttgaaatatccgtactatctctatatcctgcaaaagggcatacctttttaaatcctctatctgccttgtagtgtcctgtctgtcattcacagacgaaacacgtgcataaattactgcttttgtcttcatattattctttgaattaattgataacggaaaggggcgtgttcaaaccaccttttcagatttatttgaacacaactcccttttgattacattttggaatacttactgtctatccattccctgcggtggctcttttcaagggcatcagggtgtcttccttttacaggtctgctgtaatctttcatttttacctttggctctctttccgtcaatatcatttttggaatagaagctataagaagaataagaggcacacagcccgtaaaaatcgagacaatcaaacagaacagccatacaaataattgtttataagacataattttcaatattaaacagtcatacaaaaaggagaataccctttaaagaatattctcccgttcactcaatcaataaaccacctgtaacgttcgtcaccatgcaaggcggcatttattcccgttgcaagttccgtagcgttataagccctatccaaaaagctgtctatataactgcttttgttacttcctgtcaacagattatagaatttccacatggagagttcaccgccaaaaccgccaaaatcattatcgctgatatatgccttagccactgcattaatctgcgtatccgtaagtagcatacgtggcagccgcttttgatagccttgcggcaagcattggtacaaacgcatcttacccaataatgtggcgaattggtgttcattcataaaggtgtcgcccaaactctgcatcagatgtatgtgctttgcgggattgtagccatgaagcatttccaatacacccttatacaggtctttggtattggttacttccaaattgcttaaatagccatcagtggaaacacacaggttagtgcagaccttacaggtaaagcctacaaacaccttaaaccgttccataccttttttgctgtacaggttggtgtgattataggcacggacaccgccaacagtcaaagtaagtttgttcccgtttaccgtctcataaacggttggtatctctatcacaaaggcacacctttcgtaataaatggtcttgtctatttctaataactgattagcgggcttgtgtattgcttcgggaatacgccctttgataacatgggacacccttatatcgggtatctcaatcctttcaccttgaaagaatgtgcttgcggcatcctgtaccgtctctataaatgcagggtgtgacaaggtggcttcattgtcctttgcaaatacgggaatgatacagtcattctttaaatgctccatggtaacgtcaaccgtattggcttcaatgaataacggtcttttctgttttgctggttgttcttccgttattaaaacggcttcttccgcatattcacccaaatttaacgttcttctttcctgtggcatactgccaattactaaattgttcataatgaattacttttaaatggtttataaattgatagaatgaaacggtaaacatttcgtttatcttcaaatactctcggggggcgttagagatgtactctactttcgcattcgtagttaccaatctgtaaacctgtggatagtcagtctgatatatattccagcttcaagaaaagagggcgggggggtgatttatataagtacctgtactttagtatacgtatttccctgtattttcaagactgtggaagaagcggatatattgtgtaaatcccgtttttgtgtatatgcggatttcaaaggataaccgccgtttgtttttttaccttgttaaagatgtgtacctttgtgtatccccatgaaacggacgatatttttctattcatagtataatcttcctatttattattgatagttttatttgtagtctgacctgtccgtttcactgctgataaaaaatctgccaacagtgtaaaaatcaatggtgctatatgcaatgtattgataggcattatggactttacacgaaaaaagccgcatttgagtatgattaggcatctactcccgtgcggctttttattatctctccaaaacctgtatccaaataaaaatcagataatcttatcttttaattactaaatcataaccaactatggacgaaacaaacatttccacaccggatgccaatataaccattacagacaatacggtggagcatatcatctgcaatacccgtactataaagatagataggagtaaactcatgaaattatatgagaaaatagccaaattggaattacccttctactataagtacaaatacaataaaagaaaagctcctgaaagaaggagcttttaaccgtacattctcatagagggaaaatagtatatccagctatcttgcagtagtatataataagaataaggatattaacagcaaaatcctctggctatatcctcatccgttaaaatttccggatatacgtttttcagaacagctatttgcgtctcactcgttatcaagaatatatctttgtcaagtaaatgaatacctttcttatctttctttacatatctgagttctgtcgcttgtcttatgtatcttgatatagtggatgcacttaaacctaattctttcgctaacatattctgagaatacttgcatgtattcgtaccattcagacatttgcatttcaacaaaacgagaaaacctttcaattctctggaaataggttcgtcatatagtgtatttcctattagtacataatgttccgtatctaactcgtattcatatctggaaaaagtaccgtattttcccttaacaaggttactatgtatctttatcaatcccatatcttcaaatttgtgcagccacttgcctatctgttcctctttggttataccgtagaaagctgccagtttctcctgtcttatatgggatatagcagtatagcaatcagagcataaggctaaacaataaaacaagtaggcttcaagtaaatccaattttcccgcaattctttcagttattctgcgataggatagttttgcttctgtcattagcaacaggactttgataattggtgaaatgaatatctccttttcttactaatctcctgtatctgtgattgccaaagaatattttggcttctttttgtgtgttgaactgcaatcctgtggaaagatgaacaatcataagagtgtagttttaataacggaatgataaatctgctgtaaaatatagccactgaatttttgcgatagcaaaaatgaagcaggtagtgtatttattttccataggtatttataagtagcccacctggatgaaacacccatacaccacctggatgaaacactggtgaaattcgactttataaacggatagtcttcattttttatggaagctgtatacctgttcaacagcccatacagtttggatgataataaactgtgtgcactttcttccttatctgttttctggttttaatgtacccgttcagacttgcccacatgccaatgctgaccttattgtctgaaacgccctgtgataacgctttttctctgatttcttcgtaagtgagtagccgcatgatgaatttatggataaaaaggtgtaaaaaaagaggaatctttgaagtgggtatatctgtcggtctattcgtaagtcactgatacaaagatacaaaacttccgacaacccaccaaaagataataccacaaactggaaaaatcgactggaagtgcagattaactcacgatattgcctttaattaaaggcatttcatatttataacataagaatttaatatataatatcttgcttcgatttatttattctgtgtctgtactttcgctaaatattctttcctataattatcatctatgcttatttctgtaaatgcagatgtttgtacgtaacaggaagcaaatatatcatggatattgattgttttagttaccaattgagggaaagtcagactttgtgagttatgagatattgggatatagttaaatgtaatgtttcctgtctttaagtctattgtactattgtctgtaagtgcatacgctttgtgaaggtttcttactttattgacaataatgtagcagatttgtccagatttgtaatatatcttatatgttcctttcattaggttatatggataatattcgactttttctaaaaatgtatggtatatttcacttaattcctcattagaaatctctggttttatttgattatctctggttaaggcaactttcaactgacttatttgtatttgatattggactactgttgaatttatactttttatttcactttcaactgtatgcaatttttgttgcaaatctttgtgatattgatttagggtttgaatgaagtccatatctaaatcagtgctagacaatttgataattttattttgattttcaataattctttgcttcaaattatttatttcaatctctttggaaattcttttactttctagcccattgattatttctctaagttcctttatctttttttcgctgttattattgaagaactctttaacttctgaatatcgttggagaaatagatgatgcataatcgtattagtgaggtcataacccacttcgtctgtcttaaaagtacaggcataactactagaattggggtatacgctactacatctataggttaatttggaaatacctttttgaggctttttatcttttacagtcattgcttttccacatctacatctgaatataccttttaatgggttaaatctgtgaatgcttctggaaatatatttgttgttgttttttatcatttctcttgcttttagaaaatcaacttctggtatagctggttttatacgcacttctacaactattggttttatcgaatcatcatatttactggttcttcttctaattccacgatataagtcatttcttgtcattctactaagataacttacagttgcaggcatattccgaaaattaatatttctatcagtaaagtatttagaagtcatataaagtgtttgtccagataatatgagttcaaatgctttctttacattattgagttcttctggatattcttcaagaacatatcgtttaatcgtgttattccacacttttttataaccgtatggaatatgagagtctactacaatatatgggaatcttctaaaaagagccattttcccgtcttggttcttttttttaatgtcttttctttcttgtgcagctccttttaattggaatatgagtatgagaagctctgaaaaatctagattttcacttgctttataaatcttatccttattatccagcaaaacaactgatattccttttaaaataatgctttgaatatcatgtagtgtttctgttacttcatcatttctgcttagtctagaaatttcagaaataatgagtaaatcgcaatcttcattggttaagtctagtaactgtttatatccacttctttcattggtagcaccagatttaccaaagtcctcaataatacgattgaggaaaaagtgcttttcgtcacagaatttactaattttatcacgttgtctatataactcttgtttggtggtagaaactctggaatatcctataactttcataagtacaaatatttatcttgttaatgaggacaaatatagtaataaacaataagctgggcaaatttatatcgttgtctgagtattcatttcagattcctgccaatcgcatcgggttcataggcaatggcggtcctttttcgttgatgcagcttaaggttatccaggaagtagtgacgcttatcatctttacaatattcactaccgtactgtttaaaggagaatctctgcattggaatcattttgcagctttcgtttgtctggtattggcggtatattttgtcttttataaataggatgaatgtgatgtctaacggttggaaccggtagctttatcaggggaaactttttgtttttgccgcctgaactaaaagttttatgctgataactaatgcgttggctattgtttggctgttgaataaacaagtaggtgtactttctctcatttcggagctgttgaactgctcagccgaaatctggacgatacaggacgacacaacgtgtgacagctacttgtagggatttttatctgtcatacttatctgtcacgctatagtctattgtatgatagcttattatcttatttttgtgatagcgtgacagatgtttttcaaaataaaacttcgcggaggatgaaaaccgggacgaatcgctattttaccgtcatatatttatccattcctttcgtgtagaacatccggagttcccctttttcgtccgcatatatgaagcatgcgtcgaggtcggggtgtgaatcggcaaagcgttcggcttcttccaggcccatgaccatgaaagcggtggcataggcatctgcactcatgcagtcgcgggcaatcactgtggccgacaggatactgtgctgcaccggatagcctgtgcgcgggtctatagtatgggcatattttttgccgtctttgtagtaatagtttcggtaatttcccgaagtggctatgcccacatcggtaacttgcagtatggtctgcaattcttggtttacggcgagcgagtcgtctatcggcttgttgattccgatgcgccataaactttttttcgggttttctccgcgcaccaccacttcgccgcctatatctaccatgaaattgccgatgcctttcttttccagcaattgcgcaatgacatctactgcatagcctttggctacggcgctgcacgaaagcatgatgcgggaatcctgtttgataacttttccgtcggcggataacgatactttcggatagcctgtgatgtccagcaagctgtctatcatagcagagtcgggaaatgcgcctttcttaaatccgaatccccatgcgttggcaagcggggctatcgtaatgtcaaaagcaccttgggtctcccgggagatttccatgctgcggcggaatacgttggtgaagaaagtatcgggaatgatttcttcgttccggttgatgcgcgtaatcgttgccgtatcgttaaacggagatagagatccgtcaaaccgtttaagctcagcttctatctcggctttcaaattgctgtcgtactgataggttatgttatagaccgttccgaatatcagtccgctgacagtttgataaggaacagcgcggttgtggcgtgcaagtattccgatagtgccgagggcaagcagggcaacccataaaaaattacgttgtgctttcttctccataatgtatgatgctgtataaataaattaagcgatcttcttttttatccttctatcagactgccttttatcggacagcctgccgtttcttcgtttttcactctttatttaaaagaacaagtgctctatcaatatcttcgttccgataacgatgaggataatgccgccccacagttcggaacgcagcttgcgggcgatgccgcatccgcaccggatgccgaacatcaatcctgccagtgataaggcaaacgacacaaatcctatgatgccgatagggggcagaatggatgcaaagttgcaaactcccagaaaagcgaacgaaacacctaccgccaaggcatcgatgctggtggctaccgccaatgccgctactactttcagcttggtaggatcgaactcgtgccggcaatcttcatccttgaaagattccataatcatacgtccacccagaaaagctaaaatggcaaaagctatccaatggtctatactttcaatgagatggctgaaaaaactggcgcctatccagccaagcaatggcatgagtgcctgaaaaaagccgaaagccaatgccattatcagcatcgggcgcaattgaacacgttttaatataatgccgctggctatggatacagcgaaacagtccatagcaagccctatggcaagcaaccagatttctaatcctgtcattatctcttagaatggtagtttataagttattgtataggtaaccccggttgtgtttccgttgtacttcccgtagcccggtacgtaccatggatcaccatgctcggcaacggaagaactcatacggaatttgaaacgtaacgcccaacccatatacaggtctttccatacatgcgcccgtataccgacacaaaattcggcccattgcatcgagcctttcattcctttataattaaaaggcaggctgtttccccaaatgccgtctatcaaattcggattacccaaacttcccccgtattcagggtcgttgatgcctaacgcttctacatcatatttaaagctcgttgccgcatagcgcaggccaacgagtatcatatgtccgtgttttttgttataaagcgcgttatagtccataccgatacggaaatagggagcaccggttttataatgtattcctttgtcgctccaagtatcagtattgccatatcctaattctacaatcgggaaaaagcgatttttaagattgacatcgacagctacctcactgctgaaaaagtcactcccgaacagtttgcttccgggcccccataaatcaacactgacagaaataccattgtacagcggatagtgcacttcctctttggcctcttttttctcctttttgggcggagtgtttgccggcggagcggaaatgtcactgttttgtgcctgtaatggaagagacagcagcaaacagaacgctagactaatagaatagtttaagattttctgctccataaattccggcttctttatttgcaacgcgaatagaatcaagactgtggcgactgtatcggacatctgttatggcttgtttcatttgataaccgcaatccattgacaagaagtaaggtgtgttggtttggtgaataacaagcgtatctgtcaatgtcttgctgtaatgaaacacgagtacggtggagtcggcggtatatctcagtggcaacgagagatcgtgcacttttttttgattgttgatgatgacggaatccgtgccaaaggcagtaaccgtcaaagagtctaaggtatcattggataccactttggtgtcaggatccaatgtatataggtaacattgcatcatggctcgcgttgtcattgaacagtccgcttcttccgaacaggatattgctatactgaaaacagggaaaagaacagccccgaatattataaatctgactaatgctttcatggttaaatcattttctctatttggtacttattgcgttctggtgcattgcgggatatcaactctccgagaaaacctgccacaaataactgcgtgccgataatcatggatgtcagtgacaggtagaaatagggagaatctgtcacaaggcggtagggcatcccttgattcatgtaatacagcttgctggcgccgacaataatgacggcaacgaatccgacgaagaacatcagagaacccaatatgccaaagaagtgcataggcttgatgccgaaggtggaaaggaaccagagggatatcaagtccaggtatccgttgaagaaacgattccacccgccgaattttgtcttgccaaatttccgtgcctgatggcgtacgactttctcgccaatcttcttgaaaccggcattctttgccaggtaggggatatagcgatgcatttcgccgtacacttctatgttttttataacatctttgcgataggctttcaagccgcaattgaaatcgtgcaggttctttatgccggaaaccttgcgtgccgtagcgttgaacagttttgtcggtatggtctttgacagcggatcgtatcttttttgcttccagccggacaccagatcgtagccatcttccgtaatcatgcggtatagttccggtatttcgtcaggactgtcttgcaggtcggcgtccattgtaatcacaacatcgccctgggcctgttcaaaaccgcaatagagagccggtgatttgccataattgcgacggaactttattccgcgcactttatcagattttgtttgtaattgctctattatttgccaggaacggtcggtacttccgtcgttaacgaaaataacttcataagaaaagtcacgggctttcattacccgttcaatccatgcaaacaattccggaagagactcctcttcattatataaaggaacgacaactgaaatatccatttgcttatttacgattttactatattatactatacctgatttatttgaaatttgtctgttcttgtcattcctttttacgcctcattacaaataaggcggtaggaagcgcgagcaatgaaccgcaaaatacattccatgacaccagttgcatggtgatatctatgggagtgagcgatttcacagtctccaatgtttcttgaaacatgtttgtataggcttctatgtccggtacaccgcttttgtttaagatatcaatttgagattcgtaggcattgataacgaaaccatgatcgatgaaacggaaataaatgtagtgtgccactgccgtcagcaatgcggcaaacatatacatgaatactgtgaatatccatgcatgcaagaaactgatactgccgctgcatacagtattacgatacattcgtacataataatagcccatgaaagggacacataacgtgagccctacgaaaaggaaagataaaaacggaattgtcaatcctaaagggaagaggatgaattttaaaatccaatatcctcccaaataggtgccgaacaacattgcatattgcatgtaacctttattttctgccatttttcttagaaatatggcgcaaagttataaataatattggttgtagaccctgtattcttgttaaagttgaaaaaagttaggggaaggtattgcagatttaaaatttttatctacctttgcactcgcaaaacgggtaagtcctatacggccagctcccttcgaatcctccagggcttgatcgcagcaaaggtagttggttgtagcggcgcgatgtagatagcttacccacccgcctctttagctcagttggccagagcacgtgatttgtaatctcggggtcgttggttcgaatccgacaagaggctcaaaaaaagagatatatcagcgatgatatatctctttgtctttatgatatttcggttcagtttgaaaacgggtcaatgtaaaaacctgaggggtaaatttataaattgttatctttgtctccaaattcatagcttatggagttaaacggttatcgccttcttcttcctgaaggcactttagactactttgatcttgttgatgtgaaagaaagtgtaaatgaagttgtattctaccttgaggagaaaaatatcgttcctgagaagtatacagatcaggatattgagagtaaaggcttttatgctcctgttattgttcaggattttcctcttcgtggcaagaaggtcttccttaatattcgtcgtcgtcgctggctcttaaagaagcataatgagtatatctcccgtaactggcgtatggtggctgaaggtactcgtatgacgcaggattttgcgtcttttttaaaagaactatattgatagctatccgatcagttgcaagctcttaggtgttttatatggagttgacggggatttattggagcgtcaataccgtaaccatctaagtggttatctccattgggaccaacttgttcatgcagaggattggctactattcgaaaagaatatcggtgcttatatctgtattgatgaggtagccctctcgcgtggggaactctatactgtactgaccaataaagaagctcacggtggtaaaggtagtatgattgccatcattaaaggtacggacgttcatacggtcacttctgttctgcttaagctctcccgtcgccgccgttaccaagtgcgcgagataaccttggatatggctcctaacatggagcagattgcacgcatctgctttcctgcggccaaacgtgttaccgatcgctttcacgtacagaagttagcttatgaagctgtgcaggagatgcgtgtaaaagctcgctgggaggctttggatgaagagtccactcagattgcttatgcaaaggcctgtggaaagatgtatcatgcacctgttttcgctaatggagatacaagaaagcagttgttagcgagaagtatttatctgctttacaagaaggaatccttatggactcagtctcaaagaatacgggctgaaattcttttcaaggaatatcccgatataaagaaaggatattatctgtctatgcggttaggcttaatctatcatcagtgtaagtttaaggatattgctttgacaaggctggcaaggtggtatgatgaagtagataaatcggggttcctcacctttggaagggtcgcacgttctatacaaacacattatctggatataatcaatttctttgaaaggagggcaaccaatgccgcagcagagtcattcaatgctaaaatcaaagcatttagagcacagttcagaggagtaagagatagagcttttttcttatatagacttgctaaattatatgcttaaatataaaatccctcagattgttacgttgatccttgaaaacggccttattttattcgggtcaacgtaaaaacctgagggattcatagcttatgcataaattttcgccagtctgaacaggaagaaagctctgtcctttactcctctgaattgtgtgcggaactcctttatttttgcattgaacgattcggaagcagcgtttgttgaacgtctgtcaaagaagttgattatttcccggtaatgcatctgtacggaacgtgccactcttccgaaagcaagaaaccctgatttttccacctcgtcataccagcgggcaagatgcgtcaatgccgcatccttgtacctgcattggtggtatatcagtccgagcctcatggagaggtagtatgctttcttaatatcgggatactcccggaacaggatgccggcgcgtacgcgctgtgattccgtccacaaggattccttcttatataacaggtaaatgcttctcgaaagaagctgtttgcgtgaatcaccgttttcaaagaccggcgcatgatatatcttcccgcaggctttggcatgggcgatctgaacggattcttcgtccaaagcctcccaacgtgctttaacgcgcatatcctgaaccgcctcataagcgagtttctgcacatggaaacggtctgtgacgcggcgtgcggcgggaaaacagaggcgggcgatctgctccatgttcggagccatatccatggttatctccctgacctgaaagcgtctgcggcgggaaagacggagcagtacggaggtcacggtctttacatctgttcctttcacaacggcgataagactgcccgaacggccttttctctccttgtttatcaacacggtatataattctccgcgggaaaggcagacttcatccagtcccacataaacaccgatgttcttctcgaaaagaagccattcttcggcatgaggaagctgctcccaacagagataaccgctcaggtgattccggtattgccgctcgagcagttccccgtcgaccccgaacagcgttcccaacagcctgcagcccaccggcagcttatcaatataattcttttaaaaaagacgcaaattcatgcgtcatacggctaccaccggcaaccagtttccagtcacggctcacgtaacggttctcatccttgacaacccacctgcgccggcgcacgttcagaaaaagcttcttgccgcgtatggggaaatcctgaaccacaacaggttcgtaaaaacccttgctctcaactttcattcctgcgtattctttaggaacttcattcttttcttctaaataaatcactatttccgatgcgctttcctttacgtccgagatgatgaaataatccaatgtcccttcaggaagaaggagacggtagccgttgttgtccataagatttctgagttagttttatgcaaagataggatttttacaaatattacccctcaggtttttacattgacccttttattcttttgtatccgtatacggcgttattgcctatctcttcttcgatgcgcaacaactgattgtatttagccatacggtctgaacggcttaaagaaccggtcttgatttgaccgctgttggtggctacggcaatgtctgcaatcgtggaatcttccgtttcgccggaacgatgggacgtaacggtcgtgtagccatgacggtgcgccatttcgatggcattcagcgtttctgtcagggagccgatttgatttaccttaatcagtatggagtttgcgcaacctttttcgatacccatggcaaggaaatctacattggtgacaaataggtcgtcacctaccagttgacagcggtttccgatgcggtcggtcagtttcttccagccatcccagtcgttttcgctcatgccgtcttcgatagagtcgataggatatttgtcaatcaactcttccagataagctacctgctcgttggctgtacgttttttgcctttctcaccttcgaatttgctgtaatcgtaaatgctgtcgtgatagaattcggaagaagcgcagtccatggcaatcatcacatccctgcccggttcgtagccggcagccttaatggcagcaatgatcgagtccaaagcgtcttctgtgcctgtcaagtcgggagcgaaaccgccctcgtcgcctacagcagtactaagtccgcggtcatgcaatactttctttaaggcgtggaacacttctgcgcccatgcgcagaccttcacggaaagaattcgcccctaccggacgtatcataaattcctggaaagcgatgggggcatcactgtgcgaaccgccattgatgatattcatcatcggaacaggcattacatatgtatttgttccaccgatatagcgataaagggggatatcaaggtatgccgccgctgctttggctacggcaagcgaaacccccaagattgcatttgcacccagattggatttggtctttgtgccgtccaaggccagcatggtatggtcgatactcatttgttcaagaaccgacatgccaatcaacttgggagcgatgatattattaatattgttaacggctttcagtactcccttgccaccataacgttttttatcaccgtcacgcagttctagggcttcatgttcgccagtggatgcaccggagggtacggaagcgcggccgataaagccggactctaatattacatcaacttctacggtagggtttcctcttgaatcaagaatctcacgtccgataatcttttctattttcatcttattttattttaaatgtaaattccataggtataacaagtgaaaatggaaaattgttcagtcttttattacgagtcccagcaggcttgtcaggtccatggcttggtgggtactgacgatagctccccgtatatccggcagattgacgtgaataccctcgatatgcgaatcgctcaagtcaatgcccctgagcggagtatgcgaaaattccgcttctactaactcgcaattggtaaaagcgatggaagtcaacttgcagtcgttgaagtcgctgttgcgcaaatcgcaggtggtgaactccgcctgattgattttactcatggaaaaattgaggtatctcgcattgcaatcctgcatcctgcaatgattcaggattgtttctggcagatttgtgccgaccagtttacaggaaatgaattctacccgaaaaagagagctttctgcaaatgatatgttggacaaatcgcaatgctcgaaacggacatccgtaaagtgagtagctttcagtttacagttgttgaactgtacatggctgaaagtgcaattggtgatacttttataagaacaatccattgattcttccatttgtttgctgaaacatatccctctgacagtttcttcggtcctaagccattctttgagtgatttggaactctcgacttgactttcaaaagtgggggagatgacccgtacgggcggcatgctgaagggtttgcctgttctcatgattgctgttttaaaaggtcttccctaagatatttccgccccatactgcaaatattcccaacaagatacttaataaggtatatagggcgaataatccgtaaaatccttgtttaatcagaatcaatccgtcgttggaaaatgtggaaaaagtggtgaagccaccacacaagccggtagtcagcaacattcttacttctgcggataagttgaagcgggcggataagacgtagaacaatcctatcaggaagcctccgatgatgtttacggcaaatgtagcccaaggaaaggagtagggtactatccgttcatggagtgccatttgcacgcaatagcgcaatacgctgcctgtgccgccgccaagaaatatggctatcaatattttagtcataataattgaagtctggtattgagttgacaaagatagtgttttcattccatttgtatttccgagtgagcggtatttcttttaaaaaacaggtttataatcacttatgcaaacgtttgcttttatttcatatctattttcatttgataaccttaaatcaggagactttcctgcttatatttgcatcaaataaattataaatcatagcatgagaaacatgaaagcaatttgcattaaactaacctgcttcctgctcgtactttctatgagtagtgcagcaatggccgagagcatcacctcgcccaatggacaacttcaattaaacttctccgtcaattctcaaggtgaacctgtttatgaacttttctacaaaggaaaagctgttataaagccctcaaagctgggtttggaattgaagaatgatccaggactgatgaacggatttactctggccgatacccaaacgtctacattcgacgaaacatgggaaccggtgtggggtgaggtgaaacaaatccgcaaccattataatgaaatggctgtaacgctggaccaaaaagcgcaagaccgtaatattatcatccgtttccgccttttcgatgatggcctcggtttccgttacgagtttcctttacaaaagaatttgaactactttgttattaaggaagaacgtacccaatttgccatgacgggtgaccataaggcgttttggattccgggtgattatgatacgcaggagtatgactttacagagtccaaactttctgaaatctgcggtcttatgaaatctgccattaccggtaatgcgtcgcagacacaattctctccgacaggcgtacagacttcccttcagatgaaaacggcggacggcttgtatatcaatctgcacgaagctgccttggtagactactcctgcatgcatctgaatctggatgataaaaatctgatttttgaatcttggctgacgcccgatgcagtaggtgataaaggttatatgcaagctccctgtaaatcgccgtggcgtacggtgattgtcagtgacgatgcacgcgatattcttgcttccaagttgactttaaatttgaacgaaccttgcgcttatgaagatgtttcttggattaaacctgtgaaatatgtaggagtatggtgggaaatgattgccggtaaaagcacttgggcgtatacggatgacctgccttctgttaagttgggcgaaacggactattccaaaacaaaacctaacggacgtcatggcgccaacaatgagaacgtgaagagatacatagattttgccgctgcccacggctttgaccaggttctggtagaaggttggaacgaaggttgggaagactggttcggacactccaaagattatgttttcgactttgtgactccgtaccccgatttcgatgtgaagatgttgaatgcatatgccaagagtaaaggtgttaaactgatgatgcaccatgagacttcttcttccgtccgcaactacgaacgccacatggacaaagcttaccggtttatggtcgataacggttataatgctgtgaagagcggttacgtaggagatatcatcccgcgtggcgaacatcattacggacaatggatgaacaatcactatctttatgccgtaaaaaaagctgccgactataaaatctgtgtcaacggccatgaagccgtacgtcctaccggtttgtgccgtacttatccgaatcttatcggcaacgaatctgcccgtggcactgaatacgaagcatttggcggtagcaagccgtttcataccacactacttccgttcaaccgtcttatcggcggaccgatggactacactccgggtatttttgatacaaaactggatttcatgggcgacctgcctcacggacagatacaaactacgcttgccaagcagttggctctttatgtaaccctttacagtccgttgcaaatggctgccgatctagtggagaattacgagaagcacatggatgcattccagttcatcaaagatgtagccgtagattgggacgacagcgaatatattgaagctgaaccgggagattacattaccgtagcccgtaaggcgaaaggtactgataattggtttgtaggcggcattacagatgaaaatgcccgcacagccggctttactctcgattttctgacaccgggcaagcaatatgtagctattctgtatgccgatggtaaggatgccgattacaaagagaatcctacttcctatcagataaagaaaggtattgtaaccaacaaaaccaaaatctccgtttgggaagcacgtagcggtggtttcgcattgagcttgattgaagctactccggctgagaagaagagtgtgaaaaaatggaaatgattaaggtaaaaagaaattcttaattaggtattggtaacctccccgcaggactgacttctttgttttggcggggagttttttattatttttagaggtggaatatatcgctcacaaggaaacttctttgtacctttgtgcccgttaataaaataactaataacacaaggaacttatgggaggttttttcgggacagtcgccaaggcaagttgcgtggcggatttgttttacggcacagattataattcgcatttagggacaaaacgtggcggtttggctacttatgatcaggatgaggctgtatttacacgctccattcataatttggaaagtacctatttccgtacgaaatttgaagacgaactggataagttcaagggaaattccggcatcggaattatcagtgacacagaccctcaacctcttattttaaattcccatctcggtcgttttgccatagttacggttgccaagattatgaacctgaaagagttggaaaccgaacttctggagcaaaatatgcactttgccgaattaagctccggcaaaaccaatcaaacggaacttatcgctttgctgctgatacaaggtaagacttttgtagacggcattgagaatgtatacaagcatattaaaggttcatgttccatgctgctgctgactgaagacggcattattgccgcccgcgaccgttgggggcgcactcccattgttatcggtaagaaagatggagcatatgcagccacaagcgaatcgagtagtttcccgaacttgggatatgaaatagaccgctatctgggaccgggcgagattgtccgtctgcatgcagaaggggtggaacagatgcgcaaacctaatgaggagatgcagatatgttctttcctatgggtttattatggctttcccacttcatgctatgagggaaagaatgtggaagatgtacgctttgtttccggactgaaaatgggacagaccgatacctcggaagtagattgtacgtgcggcatacccgattccggtgtcggtatggcgctgggatatgccgaaggaaagggagtgccttatcatcgcgccatttcaaaatatactccgacttggccgcgtagtttcactcccagcaggcaggaaatgcgttcgttggtggcaaagatgaaactcattcccaaccgtgccatgctggaaggtaaacgccttctgttttgtgacgattccattgtccgtggaactcagttgcgcgataatgtaaaggtgctttatgagtatggagcgaaagaagtacatattcgtattgcctgtccgccgttgatatatagctgtccgtttgttggcttcacagcatccaaaggagatttggagttgattacccgccgtgtcattaaggagttggaaggtgatgaaaacaaaaatcttgagaaatatgccactacaggttcgccggagtacgagaaaatggtagaagttatccgtgagcgttttggactgtcatcattaaagttcaatacgctggaaacattggttgaggctattggtctgcctaaatgtaaactttgtacccattgttttgatggtagcagtcacttttgattgacaaaatagttattaatgaatgaaaaagggtcgtgaattgcttggcagttcacaatcctttttttaattttacggcagtaaaatagtgattagggtttagtgataagtgattaatgccgttcggataaaaggagggcgcggttgtagcctactgaccgttaatcgttcatcactaaccactaatcgctaatcactaactataatcactatcatcatgactttagtagaacgttttttaaagtatgtaagtttcgatacgcaatcgaatgaggaaagtggggtaactccgagtactccggggcaaatggtatttgccaggttcttgaaagaagaattggaagctttggggttggaagagattacattggatgagaacggttatctgtttgccactcttcctgccaatatagataagtctgtacctgttgtcggcttcattgcccatatggatactagtcccgatatgagcgggaaagatgtttccccgcgcattgtagagaattatgatggaaaggacattgttctttgcgcagatgagcaagtagttctttctcctgctcgattccccgaattgctcgaccataagggagaagatttgattgttactaacggaaaaacattattgggtgccgatgacaaagccggtattgcggagattgtttcggcagtagcttatctgaaagaacaccctgaaatcaaacatggtaaaatccgtatcggtttcaatcccgatgaggaaatcggtttgggtgcgcataaattcaatgttgagcaattcggttgcgaatgggcttatactatggatggcggtgaagtaggcgaactggagttcgagaacttcaatgcggcttctgccaagattgttttcaagggacgcaatgtacatccgggctatgccaaaaacaagatgataaattctatccgcgtagccaatcgttttatttccatgttgcccagccacgaaacaccggaacataccgaggggtacgagggcttctatcatcttattggaattacgggtgaagtggagcagaccacggttacttacattattcgcgatcacgaccgtgtccgttttgagagccgcaagaaagaatttgaacaccttgtctgcaaaattaatgccgaatatggcgagggtacagccgcactcgaactacatgaccaatattataatatgcgtgagaagattgagccggtgatgcatatcatcgatacagcttttaaagctatggaagccgtcggtgtagagcctcacgtaaaagctattcgtggcggtacggacggtgcgcaactttcgttcaaaggcttgccgtgccccaacatctttgccggtggtctgaatttccacggacgttacgaatttattcctattcagaatatggagaaagccatgaatgttatcgtcaagatagccgaactcgttgccgctaacaaataaatcataatctataacttataagtcacaccatgaaaaccactccatttacagaaacgcacatctcgctgggagctaagatgcacgaatttgcgggatacaatatgcctatcgaatattccggtatcattgatgaacatcttactgtttgtcagggtgtcggtgtgtttgacgtctcccacatgggagagttttgggtgaaaggtccgcatgctttggactttttacagacagtcacctctaataacgtagcagcccttactcccggtaaggtacaatatacttgcttccccaatgaggatggcggtattgtagacgatttattggtctaccggtacgagcaggagaaatatctgttggtagtcaatgcttccaatatcgagaaagactggaactggtgtatgtctcataatacgatgggagctgagttggagaatgcttccgaccgtatggcgcagcttgcggtacaaggtccgaaagctatcgaagcattgcagaaactgacacctgttaatctttccgaactttcgtattacacctttacgcatggtgaatttgcaggtgagccggatgttataatctccaataccggttatactggagccggtggttttgaactctatttctatcctgaagctgcaataaaaatatggaatgccgtgtttgaggctggtgcggagttcggtatcaaacctatcggtttgggtgctcgtgatacgcttcgccttgaaatgggattctgcctgtatggaaatgacctggatgataccacgtcgcctattgaagctggattgggatggattaccaagtttgtagagggtaagaactttatcaatcgtccaatgctggagaaacagaagacggagggtacggtacgtaaattggtcggttttgaaatggtagatcgcggtattccccgtcacggttatgagttacagaatccggaaggtactcctattggagtggttacttcgggcacaatgtcgcctacccgtaaaatcggtatcggtatggggtatgtgaagcccgaatatagtaaggttggtacggaaatctgtattgatatgcgcggccgtaagttgaaggctgtggtggtgcgtccgccgtttcgcgggaaagtctgatttacctaaacaggatgatgcggtttccgtggaaattatgtcttgcatgggactgacgttgggtagtatgcatatagtaaaaaagggaatctgtagcagattccctttttccgtttctttgaaaaacagattatttcttacggttaccgtaacgactcatgaatttatcaacacgaccggctgtgtcaaccaacttagacttaccagtgtagaacgggtgagaagtgctggagatttccaactttaccaacggataagtttcgccttcgaactcgatagtctccttagtatttactgtagaacgagacaagaacacatcgccgtttgacatatctttaaatactaccggacggtaattttcaggatgaataccttttttcatttcaatatttgttttttaatttatattctgttactattttggtaataaatagtgtaatggtctttttcagtgcgcaaagataatgcttttctatgaaatgaaaaaaggttttttgcaaaaaaagctggcaattgataggtttataactttttattttagatttttgcaggagattaatatcatatcacctatgagaaaactgattgtattcttttctttttggttcagcgctacaatagttgtagcccagaacacggaacgcaaactgtatagcatagcgttttataatcttgagaatctctttgataccatccatgatgcaggtaagaatgactatgacttcctgcctgatggcagttaccggtggactgcgaaaaagtacgaagctaaactgcataatctctcggacgtgttgagtgccttgtcgcgtaatctggttcctgagggaccggcagtaattggcgtggcagaagtcgagaatcatagggtactgacggatcttgtcagtcagccggctatggctaactataagtttgttcattatgagggacccgacagacgtggcattgactgtgcacttttgtatgatccgcaacagtttgccgtgacgaactctaaactggtactttccgctccgtttgaaggggatacggtgcatctgacgcgcggtttccttattgtagacggtagaatggcgggtgagcgtgtgtgtttcattgtgaatcactggccttcccgcggagcgaaatcaccggtgcgggtgcatgccgccaggcaggtaaaggcgttgacggactccttgatgcatgaagacaaaaagctgaaactctttgttatgggagatatgaatgacgatccgatggatgaaagcatgcagactttaggggcccgtaaatatatatcaggtatgaaagccaatcagttcttcaatccctggtgggaaatactggaggataagggtgtgggaaccttgctctatcgtggcaagtggaatctgttcgaccagattgtactgtccagaccgttggtgaaagcgaaaaaaggactgcgttacgaccatagcgaggtttttatccgcgactacctgattcagcaggatggtaaatacaaaggttcacctttgcgtactcatggcgggcgcgtatggctgaacggttacagcgaccatttacctacgattatctatctgaaaagataatatataataatgtgtaaataacaggccggaaaataaactcgctttccggcttttttgtttatagaggtaagaacgcaaaaggagagaatgaacagacagatgcaaaaactttgtaatatagagattacaatattctgttaattcaagccaatagctttaaaatagaatggatttgactggtgagtagaggtattttattcttctcttgttcttctttttaaaggataatgcttacttttgcgtagaattttaattcactaacaataaactttaaacaaaatggttaattacaaagatttaggccttgtaaacacaagagaaatgtttgctcgcgctatcaaaggtggatatgcaatccctgcattcaacttcaataacatggaacagatgcaggctatcatcaaggctgcagtagagactaagtctccggttatccttcaggtatctaagggtgctcgccaatatgctaacgctactttgctgcgttacatggctcagggcgctgtggaatatgctaaggaactgggctgcaaacatcctgaaattgttcttcaccttgaccacggagatacttttgaaacttgtaaaagctgtatcgattcaggtttctcctcagtaatgattgacggttcacatcttccatacgaagaaaatgttgctttaacaaagaaggttgttgactatgctcatcaattcgatgttacagtggaaggtgaacttggcgtgttggctggtgtagaagatgaagtatctgctgaacaccatacttataccaatccggaagaagttatcgatttcgctactcgtacaggttgtgactctttggctatttctatcggtacttctcatggtgcatacaagttcaaacccgaacaatgccacgtagatcctgctacaggtcgtctggttcctcctcctttggaatttgccgtattggatgctgtaatggagaaacttcctggattccctatcgttcttcacggttcttcttcagttcctcaggaagaagttgatactatcaatcaattcggcggtaagttggaagcagctatcggtattcccgaagagcaactgcgcaaggctgcgaagtctgcagtttgcaaaatcaatatcgactcagactctcgtttggctatgactgctgctgttcgtaaggtgtttgctgagaaaccggctgaatttgacccgcgtaaatatctgggtccggctcgtgacaacatggagaaactttacaagcacaaaatcgttaacgtgcttggttctgaaaacaaattggctcaattggactgataaggttaatttgattataaaaatagggagtgcattttaatgcactccctatttgtttttaggtacggactttatggatttatccgtgtctatttagtccgtacctgatttatgtcaaacctgaatttatttacaattcgatgatcagggattcacgcgcttccatcttcaactctttttcaaagagaattgttttgccgcttagaatatcttttccttgtttcttgtctttcaaaatttctttgtagaattttaaaggaacggtggtttctgaatctgtaccgttcagcattacgaaaacaattttgccctcatactgacgggcataggcatatacgccgttttgtaccataaactgagtcatactgcctttggcaatcacatcgtttcctttacgccaattcagtattgttttgtagaaattgtagcaatcgttttgaattttgctgcggccttcggctgtcagtgcggtttctttatcgtctgcccagccgccggggaagtctttacgaacataaccgtcgctcttgctctttatgccgttcatcataatctccgttccgtagtataattgcggaatgcgtcgggtggtgagtaacagggtagaggcttgtttcagcatcggaaggttttcgccttcacccaaaaagcggtcggtgtcgtgattctcgatgaaagcgagtaccgattccggattcggataaagaaaatcatatacgaaactgttatacactcggtctaatcctttaaaccaagtttctgtttcctccgttttggcaatgttgattttatcatagaaactgaaatccattaccgtcttcagattgctgtttttaggagcggacagtttggagtccttttgccaccatgcggtatatgccggttcggttacccatgtttcgcctacggtgttatagttagggtattcttcattcaactctttcatccaattgctcatggcatcatagtcggcataggggtaagtatccatacggataccgtctatgtcggcatattcaatccaccagaaactgttctgaacgagataacggtatacatgcggattcttttggttgaggtcgggcatggcggttacgaaccaaccgtcattcatctggctgaaatcgtatttcgaagcataagggtctacgtggggagtcagtttgaaggatgtctgcacaaagttattttcatggtcggggttgttgaaccaatctttgcaaggcatgtcttttatccatatatgctctacaccgcagtggttgaaaatcatatccattacgattttaatgccgcgtgtatgagatttttcgatgagctgcttatactcttcattggtgccgaagcggggatctactttataataatcggtggtggcatagccgtggtaggaaccgccggtcatgttgttttccaataccggagtaaaccacaaggcagttacgcccaaatcggaaaagtaatcaaggtgctgttcgatacctgcgaggtcgccgccatgacgagcatttgggtcgttgcggtctaccttatattctgccatgcctgctatttggtcgttgtccgggttgccgttggcaaaacggtcgggcattaacagatagagtgcgtcggatgcatcgaaacctttgtgctcgcagccttttttggcacgttcttttagctcatattctttgacgaactttttcttgccttgcgtgaaggtgagtggcattttaccgggtttcacgtttttatccagtctgaggtagaccagcaggtaattattgctttccaatttgactgtgctgttcagcgagacgccgggatagttgacagataccgttgcattgccgatgccttcaccatataccattagctgaagttcggggttttgcataccagtgtaccaaaatggtggatcgattttgtttacgttcatggctgcgtacgtactgagggaaagtaggagtgttcctaaaatgaagaatacttttttcatgatattagcttttcgttattttctccgctaaattaaaaaaaatagcggagaaggctgttacctctccgctattatcctttatgcaggttatgcaaacgttttcactgcttacatcaggaatcccaacagaataccggcagctactgctgagccgataacgcccgctacgttcggacccatggcatgcatcaacaggtagttggttggatcatattccaaacctactacttgagagatacgtgcggagtcaggcactgcagatacgcctgcattaccaatcagcggattaatcttgttgcctttcttcaggaagatattgaatatcttcacgaagattacaccagaagcggttgcgataatgaatgagaatgcacccagaccaaaaatccacaatgagtctgtagtcaggaattcggatgcttgtgtggaagcacctacagtcagaccaagcagaattgtgatggtatcaatcagcggaccgctggctgtgttagccagacggcgggttacaccactctcttttagtaagttaccgaaaaatagcatacctaacaaaggcaaaccggacggaacaaggaaacaggtaagtaacagaccgataatcgggaacattactttttccgtatgagaaactgcacgtggcggtttcatgcggataaggcgctcgttcttgctggtcagcagacgcatgataggcggttggattaccggtactaatgccatataggaataggcggacacggcaattgcacccatcaggttgggagccagtttggacgaaaggaaaatggctgtcggaccatcggcaccaccgatgataccgatagcaccagcttgcatcggatcgaatccgatagccaaagcagtcatatatgcaccgaaaataccgaattgtgcggcagcaccgactagcatcagcttcgggttagagattagagcggagaaatccgtcatagctccgatacccaggaaaataagtggcggataccaaccggaagttaccccttgatacagaatgttaagtacagacccttcctcatagataccgacttttaatccggcttccatattgaaagggatattaccgatcagcataccgaaaccgataggaatcagcaacatcggctcaaattccttggcaacagccaagtatatgaagaataaacctaccagaatcattaccagatgtccgcctgttgcattggcaaaacctgtataagtccagaagtctgcaaggttatttcctaaaaatgtgataaattctcccatattattcaataattacaaggtcagtaccttcgagtacggattctcctttactaacattaatagcggtaattttaccgtctttgtcggcattgatattgttctccattttcatggcctccaggataatgataacctggcctttcttcacggtatcacccacattgactttgatgtcaaggataacacctggcagcggagattttacacctgacttgccggttgaagcagcagccggttttacaactggagcagtcggggcagctggggctgcactaacagggcgtactaccggtttgactgcaactttcggagctttttccatttctactttgtagggagtaccgttcacttctacgtgagcgatgttgtcttcaatatctccaatagtaactttatatgcgttaccgttgattttgtatttatattctttcatcgttttatctttattaaaggtgactttactttctctgaggggtttcacgcaacgtgtaaatctttgaactccaaggtgaatagctgcgttttacgcgggtaatggtgagtacggtgtcttccacatcgtgtacatcactctgcatttcgtgcaatgccagggaaatggctgcgaatacttcacccggtgcttctcccagttgtttttctttagcctcttttttatcggtaatgcccttagcgcgcattgcgttacgtttgctgaggtttacagaaatcttgcctataatcttgaaagagatataaagaaggagtaatccggaaaatactacactcatggcggaaatagccataccgatacctatactgtcatgctcttcaaacttctccattttagcattgctgtcaatggttttgttattggtgcttggagttacatacttatcggacgcatctccttttacttcccattccggagtggcatcactgacacgtgcataagattggttggcttgtaatgttccggcgggtaccacaatctggtccagtaatttcttgccggaatcgtataagccgatccaattggcgttctggctgtctaacttaaagttggtatggaaagtaccgcgattaggttctccgtctgcccaaaacagcgcgtgctgacgaggttttaccaaagtcaggacatcacctttcgggatgaaataggtagcggtgtcacccggttggctgctgaatttcagatagcaacctgcaaggtcggcgctgccatatgatttgttgaatatctcaatccatgcgctgtgaacaccgtaatcatcctgaaagttgctttcgttggtgataagcacttcattcagcaacagtttagagtttgactccttttctccacaagaagaacagaaccccagcaccagcatcaatgaaaggaatattccgatttttgttttattcataaatttgagtttttattttttaattctcaactgttaattctcaattcttaaagaggaatattaccatgtttcttggccgggttggtcaatttcttggtttgcagttgttgcagggcgcggataatgcggaaacgcgtgttgcgcggttcgataacatcatcgatatagccatacttggctgcattgtaaggattggcaaacagtttggtatattcagcttctttttcagccaggaactgagccggattttcttgctctttagcctcgcgtgcatacagaacttctaccgcacctgcaccacccataactgcgatttcagcagtaggccatgcatagttcatgtcaccacgaagttgcttacagctcattacgatgtgcgaaccgccataggatttgcgtagggtgatagtaactttaggtacggtagcttcaccgtaggcatacagcaatttggcaccgtgcaggataacaccgttgtactcctgaccggttccgggaaggaagcccggtacatctaccaaagatacgataggaatattgaaagcatcgcagaaacggacgaaacgtgcacccttacgagaagcgttgctatcaagtacacctgccagatatttgggctggttggctacaatgccgactgattgtccgttgaaacgggcaaaaccgataatgatattcttggaatagtctttctgaatttcaaggaactctccgttgtcaacgatagcaccgataacttcgtacatatcgtaaggcttgttcggattgtcagggataatatcgttcagagaatcttccagacggtcgatgggatctgtacaatctgtgtaaggagcttcttccaaattattttgagggatgtagctcagtaatttgcggataagtgcaagaccttcctcttcggtctttgcagtgaagtgagttacaccggatttggtagagtgtacgcttgcaccacccaaattttcctggctgacatcttctccggttacggtctttaccactttcggaccagtaaggaacatgtaggacgttccttccatcattagtgtaaagtcagtcagggcaggagaataaaccgcaccaccggcacaaggaccgaagataccggaaatttggggaataacgccggaagcaagaatattgcgttggaaaatctcggcatatccggctaaagcattgataccttcttgaatacgtgcaccacccgagtcattgataccgatgcagggagcacccatcttcattgcttgatccatgattttgcaaatcttcaaagacatggtttccgacaatgaaccggcagaaacagtgaaatcctgtgcgaaaatgtagaccaagcgaccgtcgatggtaccgcaaccggtaaccacaccgtcgccggggtagtgtttcttttccataccgaaattcgtacatctgtgctcaacaaacatgtccatttcttcgaaacttccttcatcgagtaacattgctatacgctcgcgagctgtatatttccctttctcatgttgctttgcaatcgctttttcaccaccaccaagacgcgcagccgtacggcggtcaataagctctttaattttctcaagttgattactcatattctttatttatgatttatgatttcagatttatgttttcggatttatgatttcaaaccataaatctttattctcctttttcgcaaagttccgtcaatacgccgagtgtggatttcggatgcaggaatgcgatgttcaagccttccgcacctttacggggagctttgtcaatcaggcggataccttttccttcaacttctgcgagagcgtttgccactccgtcttccacagcaaatgctaaatggtgcataccgccgttaccgttgttcttttcgatgaatttggcaatggtgctttcgggagaagtgggttcgagcaactcaattttcacgtcacctactttcaagaaagcggttcttaccttttgatcttctacggtttcaatgttgtagcattttaaacctaatacattttcgtagtacggaagtgcttcttcaatgctttttacagcaatgcctaaatgttcaatgtgcgaaattttcataacagtttttattaatgttggtattcaattccaaatttttaaaatcagcagtacaaagaaagatatttctacttgaataaagaaatttttcgccaattaattataaaggtatttcttcttaaaatgattttataattgagacaaccggtcgttgttttatctattgatggtactcgttttttgttataaaagagattcaaaagctttttttgttatatctttgtcagtagaatttcaatcggacaaatattatgtcacatttagctcctttgatcgccgatttggcattgatactgatttgcgccggaataatgacgctattatttaaaaaactgaaacaaccgttagtcttggggtatgtcgttgcaggcttcttggccagtcctcacatggcttataccccttcggtgatggatacggcaaacatacagacttgggcggacatcggcgttattttcttgctgtttgctttggggctggagtttagctttaagaaaatagtcaaggtggggggagccgctataatcgctgcttgtacaattatattctgtatgatattgttgggcgtggcagttggcacggctttcggatggaaacggatggattgcattttcttgggcggtatgatagccatgtcttccactactattatctataaggcatttgatgatttgggcatgcgcaagaagaagtttaccgggctggtgctcagtgtgttgattttggaagatattcttgccattgtcctgatggttatgctgtctaccatggcagtcagtcataattttgaagggacggaaatgctgggcagtatagcaaaactgttattctttcttatattgtggtttgtggtcggcatctatttgattcctgttctgttgaaaaaatgtcggaagctgatgagtgaggagactttgctgattgtatcgctcgggctttgtttcggtatggttgtgcttgctgcccatacgggattttcagcagcgttcggcgcttttatcatggggtctattctggctgaaacggtagaggcggaaagtattgaacgtctggttaagccggtaaaagatttattcggtgccatattctttgtatctgtaggtatgatggtagaccctttgatgatagtagaatatgcgggtcctattgttgtcattacattggcggttattgtcgggcaatcgttgttcggcacattgggagtattgcttgcagggcagccgcttaagacggctatgcaatgcggattcagtttgacgcagattggagaatttgcttttatcatcgcttctttgggagtgtctttgcatgtaacaagtcattttctgtatcctatagtggtggctgtatctgtcattactacctttcttaccccttatatgattcgttttgcagaaccggcttccaattttgtcgatacgcatttgccggaacggtggcagaaatttttgctgcattatgcttccggttcgcagactgtgaatcatgagagtttatggaagaaactgatatttgctttgttgcgtattacggtggtttattccattgtaagtgtggcggtgattgctatcgcattccgcttccttgtaccgtttttcaagggaaacttgcctggaatttggggctctttattgtctgctttggtcattgttctgtttatttctccttttctgcgagccatcatgattaagaaaaaccattcggtagaattcgtaacattgtggcgcgacagtcggggaaatcgcgctccactggtagctactatcgtgctgcgaattctgttggcagtttcttttgtgatgtttgtaatagccggattgtttaaactgtcggttggtcttgtctttggagttgcggtactgctggttatagtaatgatactttccagacagttgaagcggcagtctataatgattgaacgtactttttttcagaatttgcggtcgcgggatatgcgtgcggaatatttgggcgagaagaagcctgaatatgcaggccgtctgctttcgcgtgatttgcatttgacggattatgagattcccggggaatcggcttgggcaggcaagacgctggcggagttgaattttggcaagcgttatggggtgcatgtcgtttctattcttcgtggacgcaggcggataaatattcccggtgcttctgtgcgtctctttcctttagataagatacaggttattgctactgatgaagaattgaatgtgtttggtgaggaaatgaataagctttcaacgatagctgcggacgccgtggaaaaaagtgagatgatactgcgtcagttgcgtatcgatgcaaattctccgttcttgggtaaaacattgaaagatgcaggcatacgcgagaaataccactgcctgattgttggagtggagcgaggaggggaaactttgcatgctcctgacgtgcacgagccttttgtcgaggaggatgtagtatggattgtcggtgagaatgtcgatgtgtacaaattggtcggtgaaaatgatgagaatgtcgacctgtgatattggaataacggttatctttgctttacgaacataaactttaaaaaagaaatatcatgaaaagtgatccgaaagactgtctgtactgtcagaataatgaaacgttgcataatctgatgattgagattgcgcagcttagtgtgtcacgtgtcttcctttttaaggaacaaacttatcgcgggcgctgccttgtggcttacaaagaccatgtcaatgacttgaatgaactaacggatgaggaacgcaatgcttttatggctgatgttgcccgtgtgactcgtgccatgcaaaaagcttttaatccggaaaagattaattatggtgcgtattcagacaaattatctcatcttcattttcatttggcgccgaaatatgtagatggtcccgattatggtggtactttccagatgaatccgggaaaggtgtatctgacggatgtcgaatatcaggaattggttgaagcggtgagaagcaaactttgaaagagaatgaagtataaagtataaattggcaatgagcatgatttatgaatgacaaatggttatgtaatatcatagcatagccatttataccttatacttcgtattttatattttatttaaaattttgtccattacccagtttgtcagtgttgcgctttcgccatcgcagttacagattgatttgccaagtaaatggtctacaatagcttgaataagcggttgctggacgtaaatggggttttctacagggatttcttcccttcctcgttcggtgtgtaaggctatgggatcataggtaaatacagaaaagcatatcatacctttgtctccgatgatttcgatacggtcttcacgtgcagactcatgtgcaacgaaacaccacgagccgctgcctaccaggccgctgtcaaattggaaacaggcactgagggtatcctctgcagaatatagtccgccacggttgctcttgtatccgttggcttcaagaatatatccgaacatatcttgcagtatgtctatctggtgtggagccaaatcataaaaataaccgccaccggcgatatcgggctgtacacgccagggtaggttctccttgttatagtccagatcgcggggtggctgggcaaagcgaatttgtatattgatgacatttccgatggccccttcttccaccaatgactttactttcaggaaataaggaagataacggcggtaataggctacaaaacaaggtatgccggtttcttgggaaatacggttgatacggcaacactcttcataagtcactgccatcggcttttctatgtataccggtttgccggctttcatggacataatggcatatgtggcatgggaagagggtggggtggcaatatatacggcatttacgtcttcatcattaatcagttcctgtgcatcattgtaccatttggcaatgcctctttctttggcataagctttggctttggagatatcccgactcatcacagctaccacttcggagtgttcaattttctgaaatgcaggtccacttttgtatttggtcacttctccgcagccgataaatccccattttattattttctcactcatacttgtatattattcttcaaagtcgaaatcaaaatcaaagtcatccacgaattcaggcgcagtgaagtcttccagttcacggcgatcctttttggtggggcgtcccgttcccttagcgcggttgataaatccgctgattttgctcatttccaacagttcatattgctctggggcggttatgttctccatcatttcgggaacaagcttggcgcctacacgcttttcaatagtctgtagtactttgaaagaataggtaaccggcggtttgcgtacttgtattacatctcccggcttcaccattcgagctgcctttgcaagtgcaccattgatactgatacgtccttttttgcaggcttcggctgcaattgtacgtgtcttgaatatgcgtacagcccacatccatttgtctattcttgcttcactcatttcttgttgaactgattcattgtaatgtctataccggcgagacagaaacttttaatgatttcgcctgctgttttcaggcgttcatccattgttttccagtcttcgtccgtaaagtgtcccaaaacgaaatccacttgtccgccgcggggaaaatcattaccgataccaaaacgcaggcgggcatagttttgggtacctaatgtggctgcaatatgtttcagtccgttatgtcccgcatcgcttcctttccctttcagccgcagggtgccgaaaggtagtgccaaatcatctactacaatcagtacgttttccaacggaatgttctctttttgcatccaatagcgtacggcatttccactcagattcatgaaagtagacggtttcagcaatatcagttggcgtcctttgaccgacatggtagctgtaaaaccatagcgtccgtcattaaaggttattccggctgcttgagctaaagcatctactaccatgaagcctatattatggcgggtttcgtgatattcgggaccgatattgcctaaaccggcaattagatatttcatttttatatacttggctttaatgataattcagataaaaagagaggaacgcggattatcgcagttgtccgcggatatgaaatctgcgtcgtctgcgttaatccgcgttccggaatatctcgtttgcttactaagaaagcgccgattagttgtttgcagcagctgcagcagcacctcttgcggcacgagtcagcttaacagcacatacaacggcttctttagcattcaacagttccaaaccttcgtagcttaattcacctacttttaccgttttgcccaatcccaaatgagatacattgacaatcagtttttcaggaatagcgttgtacaaagctttaactttcagtttacgcatctgcagagtcagcttaccaccggctttcacaccttctgccagaccttccatttgtacgggaacttccattacgataggtttagtttcatcaatctgatagaagtcaacgtgcaggatagtatcttttaccgggtggaattgaatatctttcaagatagcatttactttcttgccatcgataatcaggtcaaccacgtagatgtgcggagtataaaccaaattgcgcagaccttctgccggtacagtgaaatggacgttttcacctgccccgtagagtacgcaaggtacaccgttgtctttacgaatagctttcaaagctcttgcttgttccgaagaacgctctgcaatagttcttgcagttccttttacttcaattgatttcattttaatttctttttgtgttactctaaattaagtagattattgcttaattcaccatcacacgatgtggttcaccacacgatgttgcaaaaaagcggtgcaaaaataccgcttctttttgaattatcaaaaggttttcctttaaaaatcaatatctattttaatttctccgtcaagcggagaatctttttctttctgttcttctgccggctgcacattgtcaggttgttcttcattgtcgttgcggcgcataaaacatccttgctgttcctgaatgaagccaatagcctgttgcaggccattcatgaatttttcaaaatcttctttgtacaaaaagattttatgtttttcaaaactaacctgtgattcatctccttcacccgttactatcttcttgctttcagtgatagcaaggaacatttcgtcctttctgtttttcttaacatctaaataatagatgcgcttgcctgctttaatggattgggagaatactatttctttgtcgctcacgtccagtccgcttttctttttaaagtcttccatattatagctatcttgttgtaatcgggttcaaaattgacgattttttttaaactgtcaaaagaaaaagcccggataatgattatctgcattaaaaaatgtgatttatttatgtaaactcattaaaaatatctacttttgcacctcgttaaaacaccagtatttactttagttatgataaacagagttcttattcgtcttaagattatacagattgtatatgcttattatcagaatggcagtaaaaatttagatgctgcggagaaagagttgttctttagtctctccaaggcatatgacctttacaattatctgcttatgttgatgatagccttgacgaactacgcacaaaagcgcattgatgcggcaaaagcaaagttggctcccacagccgaagagttgtatccgaacatgaagtttgtagaaaacaaattcatttcccaactggaagtgaacaggcagttgatggactttatttccaaccagaaacgtacttgggagaatgatgaagattttgttaaagggttatttgaaaagattgtagcgtctgatatatataaggaatatatggcttcttccgaaaactcttacgaggcagatcgtgaattatggagaaagctttataagacattcattttcaataatgaggaacttgatatattactcgaagatcaaagcctttattggaatgacgacaaggaaattgtggatacattcgttctgaaaacaatcaaacgctttgatgagaagaatggcgcgaatcagccgttattgcctgagtttaaggatgatgaagatcaggagtttgcccgccgtttgttccgccgtgctattctgaactgcgattactaccgtcatcttattagcgaaaacacacgtaactgggatttggaccgtgtagcttttatggatgtagttatcatgcagtgtgcattggccgaaatattgagtttcccgaacattcccgtcagcgtttcgttgaatgagtatgtagatatagccaaagtgtacagtacagccaagagtggcagttttgtcaatggcactttggatggaatagttaaggaattgaaaaaagaagggaagttgtcgaaaaactgatacctttgttgaataataaaaattaaaacggaatatttatgaatttgatgacagtatttttcctgcaagctcctgctgcaggcccggacggaagcatgatgtggattatgttgatagctatgttcgctattatgtatttctttatgattcgcccgcaaaataagaagcaaaaagaaattgcgaatttccgcaaatctcttcaagtgaaccaaaaggtgattactgccggtggcattcatggtattatcaaggaaattaacgataatgatgtggttcttgaaattgcttccaacgttaaaatccatattgacaagaattccatttttgccgctgctgctgatgcaaacagtagtcaggcttctaaataagcagatgtgagcctatgtttgatcgtaggaacataagacgtatttatttgaatataaccggaaaaacaaaggactttctgctcagtgataagagcagagagttctttgtttttttatttttcttctttatagccggtggtttctggttgttgcagacactgaacaacgattatgaagcggaattttctattccggtccgtttgcgtggagtgcctaataatacgatgattacttcagagccggtctccgaactgcatataaaggtaaaggataaaggtactgttttgcttaattatatgttgggaaagagcttctatccggtttcgcttgacttttccgattataaagctgttgataatcatgtacgtatttatgcttctcagtttgagaaaaaagtgctgagtcagttgaatgtttccacccgcttgctttctatgaagccagataccttggaatacatttatgcaacgggaatgtccaaattggtacctgtcagattatcggggacagtgggtgccggccgtcaatattatttgtcggatacgatttttaaaccggactcggttttggcttatgcaccggaaggggtattggatacgataaccgctgcctatacccagcctgtcaaacaggagaatgtctccgatacattgcggcaacaggtgtctttgcttgcgcgacgaggtgtgaagtttgttcctgcctctatcgagatgatacttcctgtggacatttatacggaaaagacggtggaagtaccgttgcacggcgtaaactttccggctgataaagtattgcgtgcttttccttctaaggttcaagtaactttccaggtagggcttagccgtttccgtgagataactgcagatgattttcatatcaatgtttcttatgaggaattgctgcgtttgggctcggacaagtatacggtaaaattgcggaatattcccgacggggtgaaacaagtgcgttttaatccggagcaggttgattttcttatagaacaaatatctccttcattatgactgtcaagataggtataaccggtggtatcggcagtggaaaaagtgttgtgtcccgactgttggaggtgatgggaatcccggtctatatttctgatggggaaaccaaacagcttatgatgacagactcttgtattcgcagtgagttgactgccttgttgggtgaggaggtgtatgccggtggagtattgaataagtctctgcttgcgtcttatcttttcggtagtcccgagcatgccgggcagattaatggtattgttcatccgcgtgtaaaagaggatttcaggcagtgggtttgtcagcgtgcggcatgccggatggcaggaatcgagtctgctattctgatagaggctggatttgcagatgaggttgatgtagttgttatggtctacgctcccgaggagatacgggtgcagcgtgccatgaagcgggatgcttcctcacgtgaactgatagaaaagcgcattcgtagtcagatgggcgatgaagaaaaacggaaactggcagattttgtgatagtgaatgatggcgaaacaccgttaattccgcaggttttgggcttaatcacttttctgtctcaaaataatacctatctttgcccaccgaaaaaatgaactactaattacaaaaactgaatatattatgttgaagactattttgtctatttccggtaagccgggattgtataaactcatctctcagggaaagaatatgttgattgtggagtcacttgttgacaagaaacgttttcctgcttatggtaatgaaaagattatctctttaggagatattgccatgtatacagatacagaagaagtacctttgaaagatgtacttctctctatgaagaaaaaggaaaacggtgcagccgtggcattggatgtaaaaaaggcttctgtgaaagagctccaagcttatttggcggcggtgttgcctaattttgaccgcgaccgcgtatatgtgtctgatattaaaaaactgatttcctggtataatctgttggtagcaagtgatatgacagactttgaagaaacatctgaaactgctgctgaagaggttaaagaagaaacagctgaataattatacttcattctgaggttaaaataaaaagagggtatgtcaaaattaacatccgcttgctaattgtttctttttaggcacagattccacgttctttgttctttttccgtgaaatccgcgaaatccgtgcctaaaagaaatcatcaagtgtattttgacacaccctcttctttttttagcttgtcagtttctgaaatccaattcgtctttcgttgcattgatatctaccgtgattggtttgctacggtcaacttcctgcgacaataatttcttggacaaatcgttcagcaagtaatgctggatagcacgtttcactgggcgggcaccaaactccggatcatatcctgcattggccaggaaatctatggcggcatcggtcaataccagttccacgccgtttccggataacatcttttgtacgctcttgatttgaagtacaacaatctgtttgatttctttttcagtcagcggcaagaacatgattgtctcgtcgatacgattcagaaattccgggcggattgtctttttcagcatattcataacttccttcttggtttcctctacaatctcttccttgttggaaccgttcagtttctccatttgactttgaatgtatccgctacccatattggaagtcatgatgataatggtattcttgaagtttacggtacgtcccttattatccgtcaaacgtccgtcatccaatacttgcaatagtatgttgaatacatccggatgtgctttctctatttcatcgaacagtacgacggagtaaggtttgcggcgtacagcttccgtcaactgaccgccttcatcatatcccacatatcccggaggagctcctaccagacgggaaacgctatgtttctcctgatattcgctcatatcgatacgcgtcatcatcgtttcatcatcaaataggaattcggcaagcgccttggcaagttccgttttacctacaccggtagtaccgagaaagaggaatgagccgataggacgcttgggatcttgcagtcccgcgcggctgcggcgtacagcatcggctacagcttcgatggcttcattctgtccgataacacgctgatgcagttcatcttccagatgcaatagtttctccttttcgctttgcagcattttgcttaccggtatgcctgtccatcgggatactacatctgcgatatcctcggcgtcaacttcttccttaatcattgcttgatcgccctgcatttcgtgcagcttttgctgggtctcttcaatttcctgattcagtgcttgaagtttgccataacgtatttcggctacctttccataatcaccttcacgttccgctttatcggcttcaaacttcaggttttctatttcaactttattctgctgaattttgttgaccagtgtcttttcgttttgccattttgctttatacgacttctcctgttcttttagttcggcaagttccttgccgatttgctccagtttgagacggtcattttcgcgcttgatggcttcgcgttcaatttccagttgtttgattttacgggaaatctcatccaactcttccggtacagaatctacttccatacggagtttggcggcagcttcatccatcaggtcaatggctttatccggcaggaagcggtcggtgatataacggttgctcaattctacggcagcaatgatggcatcgtctttaatccgtacatggtgatggttttcataacgttctttcaagccacgaaggatggaaatggtgcttaacgtgtccggttcgtttaccataacgatttggaaacggcgttccaaagccttgtctttctcaaagtatttttgatactcgtccaaggtggtagcaccgatgcttctcagctcaccgcgtgccagagcaggtttcagaatattggcggcatccattgctccctcgcctttaccggcgcctaccaatgtgtggatttcgtcgatgaacagaatgatgtctccttccgatttcttcacttcattgacgacggctttcagacgttcttcgaattcgcccttatatttggctcctgcaaccaatgcacccatatccagtgaataaacttgtttgtttttcagattctcaggtacatcaccccgcaatatacggtgggcaagtccttctacaatggctgttttacctgtacccggctcacctatcaatataggattgttcttggtacggcggcttaggatttgcagaacccggcggatttcttcatcacgtccgataacggggtccagtttgccgcttcgggctgcctcgttcagattgatggcatacttttccaatgactgataagtgtcctcgctggattgcgaagtaaccttttcgcctttccgtaattcattgattgcattgcgcaagtctttctccgtcattccggcatctttcaggatggtggaagcggtactttttacggtgagcaaagcgagcaacatcggttccagtgaaacgaactcatcgcccatttctttggaatattgggttgccttctgaaaaatttcattagtctcacgactcaggtagggttctccacccgatactttgggcagggagtcaatctgcttatcaagtacgagtgcgatttgctgcccgttcatgcctaacttctggaagatgaaattggtaacgttttcgcccactttcatcacgctttgaagcaagtgtacaggttcgatggcttgctgcccccgtgcttgcgtcaagttcacggcttcttgtacggcttcttgagctttgatagtaaattggttaaagttcatatttagttctcctttctatttttatcagcttcataacactttaaaaggcgcaaaagatttgccagcagcaaaaatgagacaaaatttcagttaatagaagaaaatgaatgtcaaattggctgatttgcgacaaataccttttatctacaaaactttttgtatctttactccctcaataaataaatgagtaatatggaaaatacccaaataaaactttccgaaacggtaatggtgattgatgttgcctacctgaattttgttataaacgatttgaggaagtattttgaaccgttgctgggacgttctttacaaacagtggatctggcactttttaccatgtatctggctatggatgccgggttgaaagggagtgacaatgatgtacaggtacttctcgtatatgataagcagtccggaaagctggagcactgcctgccatccgatttgaagaacgaattggatggagtagcgtttaaggcttctttgggtgaattcagttttatggctgtgccttcagagggttttgtgtctcgtggagacttgtatcttgatttgttgcagatagtattgaataccgccgaagtgaagaagctgattgttgttccttttaatgaggagtatggtaaagaggttgagaacgttttgagggagtgcgcattggaaaatgccggacataaagaagaggcaaaagacattgtttatttccgtatggaggagcctgccgctccggctgtatgccgttgggagatgctggggtatccgctgatgtcagtgttgggtatcaggagtgaagatttgcagaataattaatcaatttaattcattgtgttgtgagcgattttcgtttaaaggtattccggtctgttgcgaagaatctgagttttacgaaggcttcgcaagaattgtttgtcagccagcctgctattaccaaacatatacaagagttggaagctgcttatcagacacgtttgttcgaccggcagggtagcagaatttcgttgacggagtcgggcaatttgctcttggaacattgcgagcggattttggaagactataaacggttagagtacgaaatgcacttgttgcataatgaatatacaggcggtttgaagctgggggccagcactaccattgcccaatatgtgttacctcctttgcttgccagctttatcggtaagtttccacaagtcagcctgtcattgttgaatggtaattccagagagatagaggccgctttgcaggaacatcgcattgatttgggctttgtcgaaggagtattcaggttgcctaatattagatatactacttttttggaagatgagttggtggcagtggtgcgtacaggcagtaaattggctgtgggagaggagataactcctgatgaattgttccatttgcctttggtgcttcgcgaaagaggttcggggacattggatgtttttgagcgtgccttgcagcaacataatataaagttatcctctttacaggttttgatgtatttgggaagcacggaaagtatcaaattgtttttggaacataccgattgtctgggcattgtttccgttcgttccattacgcgcgaattgtattctggacagttgcgtgtcgttgagattaagggaatgcctatgttacgcgattttagttttgcacagcctcaggggcaagaaagcggtttggcgcaagtattcatgcaatttgccatgcacaataaccataagttatagcacataagcagaaacaattggcatgattgagaaaagaagcctacctttgcggtcgaaaacaaattaataaaaataaaaaagtatggcttcaactcgaacattggcgaaaagcatcaatatgtcttttctgcaaaacaacaacaaaattatttacgtttcacttcttgtcattctttcttttttcttgtttcttgattatattccgggaatgcacgcttattccgcatgggttacccctccggtagctttatttcttggtctgtcgtttgctttgttatgcggacaggcacatcctaagtttaataagaaaatatccaaatatttgttgcagtattctgtggtaggtctgggtttcggtatgaatttgcaggcttcgcttgcttccggtaaggaaggtatggagtttacggttatctctgtggtaggtacattacttatcggctgggttattggtcgtaagtttctgaaagtagatcgtgacacttcttatctgatcagctctggtacggctatttgcggtggtagcgctatcgcggcggtaggtcctgtgttgagggcaaaagacagtgaaatgtctgtggctttgggtacgatttttattttgaatgcgattgcattgttcatatttcctgtaataggtcatgccttgaatatgagccagcatgagttcggtacatgggctgccattgccattcatgacaccagttcggtagttggtgcgggtgctgcctatggtgaggaggcgttgcgggtagctactactatcaagctgacccgtgcgctttggattattccgttggcaattgctacttcatttattttcaaaagtaaagggcagaaaatcagtataccctggtttatcttcttctttgttttggcaatgattgtcaatacctatgtcttgaatctttccgagacaggggctttaatcggtgcgggaatcaacagtattgcccgtaaggcattgacaataacattgttctttataggagcttccctttcccgtgatgtcctgaaagcagtaggtatcaaaccgcttgtacagggtattctgctttgggtagttatcagtgtcagtacactggcttatatttattggtcttgatataaggctgcaacggcttgaggattcagtatggtatattctttctgcattctcagtacattttcgtcagttgcatatacaaatacacatctcgctatcgccgggatgtgtatttcttttatacacccttcccagcatcgccgaaccgaaaccaatgggacgtaggtaataaaaccttgctgctccagtttctttttggtattcagttcggtgtgtgggttggtcaatacgataaaccacgaatgtggcttatctaagtgatggatgatatattgaaaagtcatagttagttgtcttttgttactgtaaaattgaaagtgtggaaaaattgcggtttattaccgactgtcattggaaaaacgatggtgactgaagttcttccgttttttctgaatttctttttgtgatatattttgctgatacctttttccgtaattaagttggttgctgtaattgtgcggtttatttcctggttgtgtttgatggtttccaaaggagcttcgtctgttgtaaaagggtagaggctgatgcctgacgcccttccgttaacaatgaaaccggcttgtttccagtttagccatacggtttcatcggtgttgtttttgatgatgactttccatgcattgctgttcggaatgaattgataaataattccctctttgttatattccagtttcccttgatggttttcatatgatttgaatgaaatgcggcagttttcgttgtcgatgtattgtgcatgtgataaggtgggaaacaggaatgacaataaaacaatgagatgaggtatccgtttgtattttcggctgtcaaagtaagtctgcataaggatggctgatatacagaccgggattgtaatgagaatgcaactactcaatgtcatggcattatatgtattatctttttatttatatgaatacgcggcaaaaatatcataaattaattgataaaacaaataaattatggattaaaacgaacttatatacagacaaattattattcaagtagttttagtgtggctaattaattcgtatcttcattgaaatggaaaagagtaatatatatattggcgaggttatcaggagtgttatggctgataaccagattactaaggctgaacttgcaagaagattgggtgttagacctcaaagtgtcgattatatgttgacacggaaaagtattgatacggatacgttatacaacgtttcaagagcattgaactatgactttgctatgctatactctttacatgaaggacagacaaattgtgatataaaagaatcctcatataatgtcgctaccgctaaggtgttggtggagttggaattaaaaccggaggatttggcaaaattgaacttgaaaaagagaatctctgatgtgttgaaatgattcgtaggtatatttataaatttgtttttagaaagaatttattggctttgatataaagctgtaacggtttgcagagataaggcggtatattccttttgcatctcttgcatttcttccttggttgcatatacaaatacacatcttgctattgtcgggatgtgtatttcttttatacatccggcccaactgcgccgaactgaaattgttggaacataagtgataaacccttgttgttccagtttcttttggatattgagttcggcgtgtggggcggtcagtacaatacaccacaaatgcggttcatgcaaatggttgataatatattggaaagtcatagttagttagctgttacaataaaattgaatatatggaaaaactgcggtttattgccgataccgattggcaaagcaatgttgacggacgtccgtccatttctcttcagattgcgtttactatatattttattaacctttttcccttttattaagttggatgcagtaacggttcgggttatttcagatttttctttgataacatccgtagggggatcatcggatgtaaaaggatacaaactgattccggaagcttttccattaatgataaaactgcctttttcccaatttatccgtgcattcttgttcgtattatttttgatggttattttccacgcattgctttccggcgtaaaacggtaaattattccgtcttgggtatattccaattttcccgcctggtttgcatgcgatgaaaatgaaattttgcattgcgttttgtccatatattgtgcatacgacaataccggataaaaaagaagtatcaggaatatgaaatgattcttgcgtttatatttccaataattgaaatatagccatagaatgatagccagtagacataccggtatcgcaataagaatgtacgttattaatgccatacactatttatgattttttgtttgttgcgtggcaaaaatattataaaataattgataaaacaacaatattgtaaaaataaatatataaataactgttaatgcgaagtgtataagataattgattgcagacgattggttatggattatacgtttccggcttttatattacatatctttgtaaatgtatgatttctgctgatttctgaacattttcttctttgttctattatcatttcgtgtatttttgtatttgtaaaagaggtgatagtcgcctgtcaatatacggatagcgtgtgaaactagtaacataaacacctcaccttagctctttaaattgcaggagtttgctccctaaaccttaggactttagtatgttatgctgtggcatttcagttgttaaggtgtggtgtttggggtgttaaggtgggggcttttgataacaaaaaatgttttgtaagatgaatagtttcattttatggatttttccgatgatggtatcttttatgaggatattatttttttgaatgaggatagataacaagaagaacgaatatgaaccatttgtcattaattgcttgatattgtgaatatctgctttcggaatagttatatggtgtctcttctcatatatgtaaaacaaatttggattttaagacaaaagaacaaccggaaagtgcctaaagcatattataaacaaaccagttctttgtgtcttaaaatccaaacttttaacctttcagttaaggattacttctcttttttcaattcctcgaaaatgagtccttccagttcctccgccagttccgggttatcgagaataacctgtttggcggcatcgcgtccttgtgcgattttagtatcattataactgaaccaggaaccacttttcttgatgatgcccagttccgcacccaaatcgatgatttctccagcacgtgagatgccttcaccgaacatgatgtcgaattctgcacgacggaaaggaggagctaccttgttctttacaactttcactttggtctgcttgccgataacctcctcgccattcttgatagcttggccaccacggatgtcaagacgtacggaagcatagaacttcaatgcgttaccgccggtggtcgtttcaggattaccgaacattacgccgattttttcacggagctggttgatgaagatacaagttgtacgggttttgctaacggcagatgtcagcttacgcagagcctgtgacataagacgtgcctgcaaacctaccttgttgtcgcccatatcgccttcgatttcggctttcggtgtcagagcggctacggagtctacaacgatgatgtcaatagcggaagaacgaatcagttgctctgcaatttccaatgcctgctcgccgttgtccggttgtgaaatcaagaggttatccacatctacacccaatttggctgcatagaagcggtcgaaagcgtgttccgcatcgatgaatgctgcgatgccgcctgccttttgtgcttcggcgatggcatggattgccagcgtggtcttaccggaagattccggaccgtagatttcaatgatacgtccgcgggggtaaccgcctacacccaatgctacgttcagtccgatggaaccggtagggattacttctacttgttcgacgctttcgtcgcccattttcatgatagaacccttgccgaaacttttttctatcttatccatggcagcttgcagcgcctttagtttttcgctgcctgccatgttatttccgttttcaaaattaagttcgtctttctttgccattattttagtgattaatgattagtgtttagtgattaattatcaatcactgttacaggatttgtgcggcgtggtctttggtctttacttccttaggggtgatgatgcgctcaatcactccttcctcattgatgatgaaggtggtgcggaaagtacccatatatttacgtccgtacatgctcttttcaccccatacgccgaattgttccaccagctttttgtctgtgtctgcaatcagggtaaagggcaggttgttcttttcgatgaatttctggtgcgacttctcgttgtctacactgactccgataacttcgtagccggccttacgcaggtcggtatagttgtcgcgcaggttgcaggcttgtgccgtacaacctgaagttgagtctttgggataaaaatagagcactattttttttcctttataatcgctcagacgaatttcttcgcctttttcattgatacccagtatttcgggcgctttatctccgatattcacgtaattcagtgtttaggggttgattggtaataaatgattaatcgctaatttaaacttccaagtttccgtcgattacttcatgccagggcagtccttgcttgttaagctgttccatgaacggatcgggatcgaactcctctacgttccatacacccggtctcttccacagacctttgaggaacatcatggcgccaatcatggcaggaacaccggttgtgtagctcacgccctgcatgcctgtttccttgtaagcctcttggtggctgcaattgttatatatataataggtgtgttctttgccgtctttcaagccgcggatacggcaaccgatagaggtttcgccttcgtagttctctcctaaatcctgcgggttggggagtacggctttcaggaattgcagcggaacgattttcatgccgttgtattctacctcatcaatgcgggccatgccaatgttctggataacacgcaggtgggtcaggtattcttgtccgaatgtcatccagaaacgtgcacgtttgattgtggggaaatttttcaccaaagactccagttcttcgtgataaagaagataagaatcgcgcggaccgatattggggtaggtgagtgctttgtggatttccaacggtttggtggttacccattcgccgttttcgtaataacgtccgttttgggtaatttcgcggatgttgatttccgggttgaagttggtagcaaatgctttgtgatgatttcctgcattgcagtccacaatgtccaggtattggatttcgtcaaaatgatgcttggctgcataggcggtatatatgccgcttacacccgggtcgaaaccacagccgaggatggctgtcagtccggcatcttcaaaacgctttttgtatgcccattgccagctgtattcgaagtgagcgacgtctttcggttcgtaattggccgtatccagataatttaccccgcttttcagacaggcttccatgatagtaaggtcctgataggggagagctacgtttatgacgatttcgggtttgaaactgttgaagagcgccaccagttcgtctacattgtctgcatctacctgagcggttttgatgttagggttgccgattgcttttacaacagcgtcgcatttggatttggtgcggctggcaatcatgatttctgtaaacacatccggattttgagctactttgtgcgcaacaacggtacctacaccgcctgcaccgataataagaactttacccatttttctacttacaaaagttttaaatatgattattttttttcaatgagcaaatataaggcttaattctcagataaacattaaaatcctgctaaatactttgaccaagtattgctatttctaaacaaaagatttgcttttggattattttgtatatatttgtggtgataaaattaacttaaacaaaaagtaacaatgaagaaagtatttgtttccctttgtatggcggctactgtggcagggctgtcatcttgcgcttcgactaaaaatgccgcaacgctctcttccttgagtggtgagtggaatattattgaaataaacggcagtgcggttgtacctgctccgaatcaggaatttccttttatcggttttgatacaaagaccggacaggtatatggcaacagtggctgtaaccgtctgatgggttcgttcgatgtgaacgccaaacccggacagatagaccttggcgcattgggaagtacccgtatgatgtgtccggatatgacagtggagaaaaacgtgctggctgctttaggacaggtaaagaagtataagcaactgggcaaggagaatatggcattatgcgcttcttccaatcgtcctgtcattgtgttgcagaaaaaagaagcttctgctaagttggccgatttgaacggcaaatggatgattagcgaggccggtggagagaccatcccgtcgggaatggaaaagcagccgttcatcgagttcaatattgcagaaaaaactctgcatggtactgccggatgtaatgtcattaacggttcatttaatgtggatgatgcaaatccggtagccatatctttcccgcaggttatcagtaccatgatggcatgtcccgatatggaagtggagagccgtgtgttgaaagcattgaattccgttcagtctttcggtaagctggcaggcggcggtatgggcttttatgatgcggacaacaatctggtaatggtattggtgaagaaataacggacatcggtcattattcagtataagattacacggatttcacagatttattttattctttttctgtgaaatccgtgtaatttttgtttgataaagaaacaaacagcgggcatttttttattttgacacatcctctttttccctcagtccggcacgtatgcggcttaatgattgcggagtgatatacaggtatgaggccaagtatttcagcggtacatcctgcaatagttccggattctcttccattaatgtcagataacgctctttggcggtgggtggtgtcccataagccagtgtcgaagcgtccactgacaaaatttcacgttcaaaaatctttctgccgaagtttgccatttcgatagagtgtgcaaacagagcctctaatttggctttactgatgcaataggctgtactgtcgtttacagactcgatattgacctgagaaggtttgtcgtccacatacccccatgaagaaaatgcggcatcgccgggagtggcaaaccataaggaattttctgttccgtctgccaggtagtatgcccgccatatacctttctttataaggtagaaattagaattccgttctcccttctctattataagctctcctttggaaaaggatatttcttccatatgagacaacagctcaaacaggcttttttcgggtaatttatacttcttgcagaatttctttagcatgatttccatgttgcaaagatattgaattttccttgccatttcttttcctgcccatataaataatgagtatgaaaagagtggtcaataattctgccagcggggtagccagccaaatccccggtttgcccaatagtagcggaagtccgtaaaagcagagtgtcaataagataaatccgcgcagcagcgtgatgacagtggcgtacttggcgcgttccacgctctgaaaataaccgatggaaactatgttgattgcaaagaatacgaaaccggatgcatataaaggcaagcctttcactgctatatcataggcgggataactccggtctatgaacatggcaacaatctcccggctgcaaaatattgtaatcagggcaaagcatatcccgcagccaacggctgtctttaaggcaagcagatatgtcttgcgtacgcgcaacgtttcgttaagcccatagttgaaactgataataggctgtgcagactgcgcaatggcattgtataccataaatatgataggaaagaagtagcaggcgatgctgaaggccgccacaccgtcttctttcagataatggatgaatacaagattgcctacaaacatcatgcaggcaatagccacttcacacagaaaggcagatgagcccagccggcacatataccctacattgcgcttcatcagcttcatgctgttgcggctgaacttcaccggatagaaacgcagcacacagttgcgccgtgaaagatagatgataatcattaacgctcctaccgttgttcctatggcgcttgcgaaggccgcaccgaacattccccagccgaaagggaagataaacagataatcgagtatgatgttcagaacggaggcaactatattgcagaacatggcgaagttgggcgaaccgtccagtcgcaggaaaaacatgcccgaattaagcagggccgtaaaagcggaaaagggtacaaaccagcacatatattctacagccaaaggtttgagccgttccgaactgcctaacagatgtaccacttgcggtgcaaacaggcaaaatagggtagaagtgcacatcagcagcagggaggataccactatggattgcgtaatgttgatacgtgccgttttgggtttattgtgtgacaagtggatggaagccaccacggatgctcctacgccgaacatcaggccgatgccggtggagaacaaccatagcggtgccacgatattgacggcggcaagggcatcgctgcctataccttttcccacaaagataccgtcggtaatgacgaacaatgcggaaaatatcattcccagtacggttgggagcagtaatttgcggaataatgccgcaatgtccatgttcttgaagtcaatactgtctctcatcttttccataatctttagtcttctatgttttattgtaatctgtttctttgtttaagaggttcggcggctaatgcttattcgttccgccatgaggaagtttttgttccaccacggagaaacttgtgttccatcacgggatacattctgttccaccatgatggaacggataaatattggcaatgctcctttttagaaagtgttttggttttatatcagctttctttagagaaaatctgataaagtctgaaaaaagagaaccaacatgctttcttgaatccctcaaacaatatcttttctttttcgggggcaaaagtaggacttttgagtgggatagaaattaacaaatggtaatttccgacagaaaaaatatatttaattctgccaaactgacagacaaactgtcacattcataaatctgccgccgccttgaacaatttggcacggcgtttgtctttttattggcgtctgccaacgaggcggacagcgaaacagaataataacaaataaaaaaataacgatcatgggaaaaattattggtattgacttaggaacaacaaactcttgtgtttctgtattcgaaggaaacgaacctgtagtaattgcaaacagtgaaggtaagcgtacaactccttcagtagtggcatttgtagatggcggcgaacgtaagatcggtgatcctgcaaagcgtcaggctatcacaaaccctacaagaaccgtgttctctatcaaacgtttcatgggtgagaactgggatcaggttcagaaagaaatcgctcgcgtaccttataaagtggtaaaaggtgacaacaatactccgcgtgtggatattgacggacgtctctatactccgcaggaaatttctgcaatgattctgcagaaaatgaaaaagaccgctgaggattatctgggacaagaagtaacggaagccgtaatcaccgttccggcttatttctccgactctcagcgtcaggctacgaaggaagccggtcagattgccggtctggaagtaaagcgtatcgtgaacgaaccgactgccgcagctttggcttatggtatcgacaaggcgcataaggatatgaaagttgccgtgttcgacctcggtggcggtacattcgatatttctatcctcgaattcggtggcggtgtgttcgaagtattgtcaaccaacggtgatactcacttgggtggtgacgacttcgaccaggtaattatcgactggctggttcaagagttcaagaacgatgaaggcgccgacctgactcaggatccgatggctatgcaacgtttgaaggaagctgccgaaaaagctaagattgaattgtcctcttctacgagcacggaaatcaacttgccgtacattatgccggtaggcggtgtgcccaagcacttggttaagacgctgacccgtgccaaattcgaagctttggcccacaacttgattcaggcttgtcttgaaccgtgtaagaaggctatgagcgatgccggtttgggcaactccgatatagatgaggttatccttgtgggtggttcttcacgtataccggctgtacagaaactggttgaggatttcttcggtaaagtgccttccaaaggtgtaaatcccgatgaggtagtagctgtaggtgctgcagtacaaggtgccgtattgacggacgaaatcaagggtgttgtactgttggatgttactccgctgtctatgggtatcgaaaccatgggtggtgtaatgaccaagctgattgacgccaatacgactattccttgcaagaagagcgaaacattctctactgccgccgataaccagacggaagttactatccacgtattgcaaggtgaacgtccgatggctgcacagaacaagtcaatcggtcagtttaacctgacaggtatcgctccggcacgtcgtggtattcctcagattgaggtgacattcgatatcgatgccaacggtatcttgaaagtatctgccaaagataaggctaccggcaaggaacaggctatccgtattgaggcttccagcggtttgagcaaggaagaaatcgaaaagatgaaagccgaagccgaagcaaatgccgaagccgataagaaagaacgtgagaaagttgacaagttgaaccaagccgactcaatgattttcactactgaaaatcagttgaaggaactgggcgataagctgcctgccgacaagaaagctccgattgaagctgccttgcagaaactaaaagatgctcacaaagcacaggatttagctgctgttgactctgcgatggctgaactgaataccgctttccaagctgcaagcgctgagatgtatgcccagagcggtgctcaaggtggtgcacaggctggtcctgatatgaatgcaggacagcaaggcggtgctcaggataatggcaagcatggggataatgtacaggatgctgactttgaggaggtgaaatgattccgataaggaaacaagataataaacaataagcaaaagcgtgcagctcaatgagttgcacgcttttcttattatccgcatggttttccttatttgtttggattgaggattatgtatcttaggttataatgaaagtagtaaatctgctaataagacggctgtttccggttcatcttttggggaatctttagatttccatgctacaataaatcggacatacgcagctctcactttataaccctttttttcccactcacacattgtggcttgcatattctgtgataattttgctaccgctttattggttgaggctgtatataaaacagagtctttgtaaatcagagaatctccacttcttaatgctaatatctcttgtttgcgtcctttaaaaaatttcagaaagacatctttgtgggagagttgcagaactatttcttcgggcatcgcatattcttttcggtcgatacaatgtctgtcagcgcttatatggttgaagcagttgccattcgtatgtataaacagttgatttttagcacgggtcattcctacataatatcgacgcataagatggtcgtcttttgagtaattatcggatatgagcatatacacattatcgaattctcttcctttggctttatggatggttgatactacaacatctgtccccgaaatgtcacagaaatcttctactgatgattcaaatacaaattctttgaagtcactatggtattttactttattggtttgttcaaatagttctatgcaacgctttacatatgtcaagcttttacttttttcataagtggtgtaggttacatgcttcgctttttcccataactcttcctgaattaaaggtgtttttatccgtttctctatatatctcaaaaaatatctcatctcggccatattccagaaaaggaagccatccatggattgtatcaatttgctgtttatggcatgctttcgcaaaagagccgttaaaatgactgcttcttcgtttgtttgggtaagcacacatgaggtcccgcttcctcgttgatgaagcagttcttcaaccagtggctgatacatatactttgattgatgatatgttactccaacccatccgttctcttttcgcattgaaatgattggggtgcttttcattcttttgcctatattcttagcgaattcattggcaaaatttaccaaatgatgtgtgctgcgataattttcagtcatctcaatgaacttactttcaggattttgtgtcagtcgatacatatattgggaattcgaaccgcggaattcataaatgttttggtcatcgtcgcccactgctataacacgcatctcttcattattggctatcaaggcattcacaaggtcgtattcttcttttcccatgtcctgagcctcgtctatgacaagtactgtcttaccgatcttggttggttccacttccccttgattaatcattttagcagctttcgagacgatgtctttggcatcctcaaggtttcctattcttcctaaaaggtcaaaacaataggaatgaaatgtttttatctcaataaaatgggcagcatttcctatcagctccataagcctctgtttgaattccgtggcagccgctcttgaaaatgtcagcattaagagctgttcatgctttacatcttcaagtaataggagtgatgcaagtttatggaccagtacgcgtgtttttccactgccgggacctgctgcaacaacgatgcagcgcgattccttgtcggaaataatttccatttgacgtttggatagttgaccgaacaattgcttgtatttctgaggagtcaggttgcgctgtatttcacttactctttctcctttaaaatattttgcgacaaactttttgtagtccatctggaagtagtcttggacatactgcaatgctgcattataatcctttaccatcaaattggcgtattcccctacaatatgtacttgctggattttttgcttgtagaattcgttaagcatccggtagtcgtcttgtttatatcttgatttgttatcctttattctttgaatattcatagcattataaagaataaggaaaccgccttcaagctttaatgctccgatttttgatagataaagaagggcttcttccacatcttccaactgtagtttgtcgggttcgctaaaaagagattggggatttgactttatttgatttagaagttctactacggaaaattggactgttttgttttgtgagcattctttttccgtatcggcaactaacttgtatagccattctatggtgaaacggcttatttccagtcgtttttcaaactgtttgatggttgaatcgaaatctgtctggcgactgattgttatattatgggaagcgtcttcttcttttttgacgtatcctttgacacagaggaaatagagcaatgtccgaatatccttttctttggatgtattgattccgctgtttgtggcattatcatttagttgcttatatgatgtttgtaaagattcgtcaggaatgtggttaagaatatatcgttcgagttttgcaaagcgttcgaggagagcctgcgattttcgttccgagtctccggtatcctgtagataagcggatatatctttgctatctgccaatatgccttcttgacgcatgcgctctacaacagatattatttcttttttactgattcctaatatatctgccagataatcaattcgtgattcagcctctgagtcttgagctttggtaatatatttctgtgaaatcagtgatttgatgattcgaacggccttttctatttcatcactgccaaataacaatgatgccgatatacgcattcttgcttcatctatattttttactgtgatacccgtagcatacacatggggtacgttatttcctcttatcaggtatccgctttgttccaaagtagccaatgccgtccgaacacgggtttcaatatcggatacggagtcgtcccaacctgcctgccgtgctatttccaatgcagaacaattgactctcatacgttgtctggtaaggtcctttatggccttccatacttgttgtatttcgctgatacttaatttggtttgattcagcagtataaaatgcttgtccaagtcattgtcgctgtaaagtacataacaacgtgcgctgagtttagggtcgcgaccggctcttcctgcttcctgaacatagttttccaatgaatcggatatgtcataatgtactacaagtccgacatcttttttatcgactcccataccgaaggctgatgttgctacaatgatgcgtacttggtcgttcataaatgcatcttggttggcaatcttttcttctgactccatcttaccgttgaaaggtaatgctttataaccgtcacgagtcagttttacagcaagttctttagtacgtttagtgcgcgatacgtaaacaatggtagggctatcggactcagctataagtctccttaattttaaatatttatcatcatcagtttcagcgtgtatgacagaatagcgaaggtttgttcttgaggctgttgatgcatacaattccagatttaaatttaatgtctgtttgaaataatcgcgaatgtcttgcacaactttctgtttggctgtggcagtgaaacaagacacaggtattggttctttgcatccttttttctgttgatattttctgatgaatttcccaatataaaggtagtcgactctaaaatcctgtccccatgaagagaaacaatgtgcttcatctatcacaaatcttactacatggcgcgccatcagaattttctcaatggtttttgaacgaagcatttcgggggctatatataagagggaagcttccccattttgtactctttgtattgatagtgcccgtgtaatagggtctaataggccattaatggttacagcatcagtaattccccggtcggcaagattatctacctggtctttcatcagtgactgcaatggtgagataacgaccgtaagaccatgtaccgaatgaccggacatgagtgccggtagctgaaaagtcagcgattttccaccaccggtagggaatattgccagtaacgatttgccttttaccgctgcttgaacggcttgttcttgaagagcctcaccctcataggtgcggaattgttcgtatccaaaaaatatttttaagttatgtagtacatccagttgggtgttgcagtaaacacaaccttcgttgcatctgttgtgtcgtagaagttttataacaaattccactctgggataattgtaaagtacccatcccggagtaatggaatgatggtcgattgtgtcaatcagggctaatgcgtatgccagttcgcacggatattgtttgataagcatgtcaagctctgcatgctggcatattttattcacatagaggttgctaatcagttcggatattcctttgttggcatacatagcacctaccatgctgagaaaaccttcgaactctttcctatcctttaataaagatgcaaataaccggcgctttgcatccggtaacgaatgccagcgtgctatctcatccaatagcagtgcttttgctttttcgcaatcatttaccggattattcatctgatcacttatcagtttgtcatctttcaaaagcttatggtaaggacgttccggaaacagcaaaggagatatataaagcgtgtcgaccaaaatccattggcatgttttgtctgtgaatagatatttggcatcatggtgaatgatgttatgtccgcatatataatccgtgccgctgagaaattcaaataactccttttttgaagctttgtggtatgttgcaccatcatggcggagtgctccgatatcatggattttatgatttttcaagccgacttcgacatctactatggcatatctgatgtttatgagtctactccatattggcatatctcaacttatcttttcttcaaaacactgttaacaactctgacagaagaaaccagcttattggtagaagtaaatacatctacgttccacacatgagatgaacgtcctttatgcacgatagtcgctaccgcacgtacggtatctccttcgtgtgcggacgaaatatggtttccgctgacttgcatgcctaccacaatttcatcgggctggcaggttatcatagagccgagtccggcaacggtttcggcaagcgcaagagttgcaccgccgtgtagaatgccaaagggctggcgggtacggtggtctacgggcatggttgcttctatgcgttcttccgaggcataggtgtattggatacccaagttgcccattaatgcatggcgtgcccgctcgtttagcaggtcaagaggtatttcagcagcatgcacttcagccagaatcaatttttctacagattgggcaacaccgtcttcttcattggaagctgttacatagtcggcacaaacttttacggagtcttgcgcatgccccatggctatgcccagaccggcaacttggagcatattgacatcgcatacaccgtctccaatggcgattacttcctcacgggcgatgttcaaatatgataataggacgcctaaggtgtttgctttatcaattccgcagggcacgacttccagaaagtaaggttccgagcaaaaaacatccagcgttccgtccaaacgctttttccaatgttcttccaaatctttcaatgcttcttcatcattactgactaatatgcatttgcatggtgcaaaatctattgctgtggaaaattcttcttcctgaatgattttcagattattcaaattggcttcggcacggacatgttcattatcggaactatctgtcagtatggtatcatcatggtaagtaaatatggcaaaattatttttgcgtgcttttttctccaaataaggtagcatttccggattgattcgccgttcaaacagaatttccccattttgcgcattgattatctgaccaccgttataggagataatgaagcccccatagttgcctaattcaagagttttggctaatggcataaggccgtatgtaggtcttccggaagccaatgcgacacgtatgcccatttgctgcactttaagtaaggaagcaagagtccgtttactgatttccttggcatcgttgagaagtgtcccgtctacgtcaagaactaataatttgtatttcatggcagcttggttttggttatgctaacaaagttaataaaatggcggttaaaacaaccgattttaaattattttgacgaaactggttataatagcttttgtaacctgaattctttaggagacatgccggtgttctttttgaaaaaacggctcaggtaagattggtcggcaaagttcagcagttcggcaatttcggtaacagataagcacggttcgtttaaaagaactttggcttccgctatcagttgctcatctatcagttgtttaggcgtttttccattcatgtattgagtggtgatttcgtataggtaacgaggagttatgcagagctgttccgtataaaacggaacttgatgttcgcaagtactgtgttcgcgtatcagttgcatgaactggtggcagagcatctgttttctgctatattgcttattggcagccagtttttccggaatagtattgaaaagccacattaatatgctttgaaggaaattaagttcttgttgttttctgaacaagagtgtgttgttgttcttgaaaagcatttgggcaacgtccatccataatacaatttcccgccacgtattctgactcctttcatctgccgtgtgatgataatgcgggtgttcatgtacgtaattgaagtagggggtatcaatcggtagtattgcttttaggaaaacgtctttgggaaatagaagtatccgtactttaaaatcggcagaggcctgtattatctggatgaggctgcctgtaaggaaaattaattcggtttgttcatcaaaagcatattgttgcactcctgtcgaaataatgcttttaccctgtatgcagattaagtatatgccacatttaaaacggtatggacgtagtttcagatacgacaagtcggtttcttcatatctgatatgggaagtgtctggagatatttgttcgtacatgtgaataaagttctgttttacgcaacaaatatactaatattcaatgataatactgtatattgttccgaaaatgaaatgttttgtacaagataagccataggctgtttggaaaatatgggataattttgccgccgattttaaaagagggaaagataatgacaggtaaacaaaattcaaaaggtttcatattggtgtttttggggatgttgagcgcttttggtccatttgttatggacatgtatcttcctactttaccggcaatgtcggatttcttccagactacatcttcaaaagtgcagttagggcttactacgagtatggtggggctggcgataggacaattggtttttggtccgttaagtgataagtacggtcgccgttctcccttgttggtagctatgggtctatttctgatttctactgtaggctgtatcttctcccgggacatatcacagtttgtgttgtggcgttttgtgcagggagttgccggagcgggaggagttgtgatatcccgttctattgctgccgataaatattctgctcatgagcttgctggcatgttggctactattggcgctgtcaatggaatagctacggtagttgctccgataggcggtggggcattggctgactttggaggttggcatggcattttctggtttttgtttgcattgggcgttcttctggttatcggaagtgtacgttttaaggagtctctgccaattggacaaaggcaaaatataagatgtgtagatatgtatcaccgtttcggtgccgtattacgtaaccgccaatatgtgcgttacattttgcaatacggttttacaatgggtgttctgttcaccaatattgcttccgctccttttattatgcaacaacattatggtctttcacccatgctgttcagtgtttgcttcggggttaatgcggttgcaatggtaatatcttcagcattgtctgtgcgttgttctaccatggaacatgccttacatataggaaatcatgggatgttgtttatttccgtactactttccgttgcattctttctgaattgtaatttctgggtttatgaagcattggtcttttgtttgctttcaatggtaggaatggcttttactgcttccaacactttggctatggactgtgaacgtaggaatgccggagtagcttcggctcttttaggggcaataggttttgcatttggaggtatcgtgtcacctttggtcgggatgggagatatcagaagttctgccggatttctgttctttatgggagcattatgttcttgtatatgtgcccgtttttcctttcatcggttaccttctcgcagaaaggggttaagttatgcttcttataaaataatgaatgtttttttgaagaaactgttgtaagatttatagacttattatatatattcctatctttgccggcgttttgtttcgcgttctctatccggagaagcggatgaaaagggaatcgggtgaaagtcccgaacagtcccgctgctgtaagttccgtaaaagatgtattaatacttatgccactgttcttgaagaatgggaaggtgatacatcaggaataagtcagaagacctgcaaaacgaagtcaaaaaattgtccgttcgaggaaagcggacagtgtgtaagtggttttaagataatctttgcttactttgtatggcgagaagaactaaagtacggatagtctgtgctatcggttttttgtgtgcagtttccctttctgcacaagaagtggtcagggatacaattacaggaaaagtgcaccaaatagagaaggtgacagtgacagcccgtagattacccaataaagtaacttcatcagttcccatccaaactttgtcgcaacaggatattagccaattgggcatacagaatatggcagatgccgtacgtcgttttgccggtgctaatgtaaaggactatggaggaataggtgggttgaaaaccgtttccgtccgtaatatgggagcggcacatacggctgtcagttatgatggggttgttgtgagcaactgccaggcgggacaaatagatattggtcgtttttcgttggataatgtctctgtgctttccctgaatatcgggcaaccggaagacttgttgcaatcggcacgtatgtatgcatcggcaggggtgttgagtattgaaacggaaaaaccgcattttgaaaatgaacgcaattccgcatttcgggtgcagatgagaggcggttcttttggctacgtcagtccttcaatccggtggtggcagaaagcaggtagccgtacttccttttcgttgaatggaaattatatgcgggctgatggtaattatccattcacgttagtgaacggaaaatatgtgacggaagaaaagcgtaataattcggcaatctatacttatcagatagagcctaccttatttcatactttcaaagatagtagtaatttggaattgaaggcctattacttttattcaaaacgggggttgcccggttcggtgacactttataatcctatttcagatgaaactctttgggatgagaatgtttttatacaaactcgttacaagaaggatttttcacagaaatggtctttacaggcacaagccaaatataatcatggatggaataaatacgaagataaaggcaatgagtatgcagacgggttgtaccgggctgtgcatcggcaggatgaatattatttgtcggcaactgcattatatcgtccatggaatgttttgtctttatctttggcgcaagacggaattatcaataaattgcgcagtaatttaccggactgtccttttcctataagatatacttctttgacagcttttaacgctcgttatcggcagggtaggataacagctaccggttcgttggtctataccaatgtaaccgaacatgtgaaaataggtgatgcacctgctgactttcaacgcctggctccttcttttacggttagtttacagccctggcaagaacaattgctctttttgcggttaatgtataaaagtactttccgtatgcctacattcaatgacctgtattattatcggctgggcaacagaagtctgcgtccggaaaaggctaatgagtataatatgggcataacatggagcaggtccttttcttcttttttaaattatctatcagtcactgttgacggttattataatgatgtgactgataagatcgttgcattccctaccacctatgcctggaagatggctaattatggaaaagttcatgttacgggaatggatgctacattggcggcggcagcttcattaggtaaaaatatggtgcttgttgtgtcgggtgggtatactcggcagaaagctatagacttgaccgatgccacttctaaaagttataaagatcagctgccttacacccctaagcatagcgggaatgtatctgcagttttggaaatgccgtgggttaatgtggggtattccattgtaggggtaagcgagcggtatagtatgtcacagaatatacctgagaatagaattgacggatacatggagcatacggtcagtctttccagaaacttctcttttcggcattgtaaattgcgtttgcaggccgaaatcattaatctgacagatacacagtatgatgtgataaaatattatcctatgccgggacgctcttggcgactgacgggaacaattgaattttaaccaattaaataagtaagaattatgaaagtaagaagtttattagtcagcatgctttgtatgctcgcgttaagtgtttcatttgcgtcttgtagtgatgatgacgatttgttagatgattcaggttcaacagttgctttgccgcaagtgcgtgcctttttcctgaatgcaggtacgcaaggtgctaacaacgcaaatattgctttttatgctcctaatggaggtgctgattttatcggtgatatttttcagaaacaaaataaggctaagttgggagaccttggtcagacgatgattgaatacaatgaatgtatgtatgtggcagtatatggctccaactatctggtaaaactgaatgcagccggtgtggaacagactcgtgcgtcatttgtggatgatcaggatttggcggctggtatccgcgcaatagcagccgaagacggttatatttatgcttctttctatggtggtgtcgtggcaaagattaatgctaatacgttaaaagtggaaaagaagttagctattgagaatggctataatctggaaggtatagcaattagtaataacatgctttatgtggctaattcttataagcaggttgacgggaagtgggtttatctgaatgatgtatttgttgtggatttggctacatttactttaaaagaaaagttagctgtggcaacaaatcctaatgttttgatggaagaagatgataagatatttctcatagcatgggactattcttttgtagaggagggttatgttttacaaataatagatccagctaatagtaacgaggtgactaacattggtcacgctacttatatggctgcagatgatgatgttgtgtatctgattaattcattgacaaactggaatgtaaatcctgctgttacaaccaatcatttcagtacttataatattaaaaccaaaacattgaaccagtcttctttcttgaaagatgatgctcctaaagaactggcaacaacaagtacgtctatgttgcaggtgaatgatgataatggtgatatttatattggtacaacctattttgctgccggtaatggaaatatctaccgtttcaagaaagatggaactttcatagaaaagttcgattgtggtggtcagaatcccaattctgctgtgttctttaattaaaaatgagaaaagttacatttttgtttcttatgctgacactggtcttgttcctttccgcttgtagtgggaaggacaagactgtctctgtttttatatccggtgatactatccctctgcgttatgccgataacctcacgttagtaaattatcccgactacactattgcgactttacgtaacccttgggataccctgaaaacattgcacacctatattttggttccggcatcccaacctttaccggcgcatctgcccgaggggacaattgtgcgtactccgcttcgcaaatcggtcatttattcctcggttcattgcagtcttatggataagttgggagctgcaggcagtataggcggtgtgtgtgacttgaagtacattaaactcccggttatacaggacggataccgtaacggaacggttaccgactgtggtgacggtatgaatcctgatatggaaaagattatcgacctgcatcccgatgctattttgctttctccgtttgagaacagcggtggttacggacgcgttgaaaaactgaatattcctattatcgagtgtgccgactatatggagacttccgctttggggcgtgccgaatggatgcgtttctacgggttgctttttggtgttgtctcaaaagccgacagcctttttgccgaggtggatagttgttataaccagcttagaaaacgtgcttcactttcgtcttcgtctttgtctattgtcagtgaactgaaaagcggttctgcctggtatgtaccgggtggttgcagtacaatcggacgtttgtttaatgatgcctgcgggcgttatgcttttgcggaagataaacacagcggttccattcctttggcttttgaaacagtttttgacaaggctggtgatgcagatgtatggactattaagtacaatcgagaccgtgatatgacctattctgatttgaaagccgattatataggttatactggcttcaaagcatttaaaacacggaatatttacggatgtaacacggcaaaagttcctttttatgaagaaactcctttccgtccggactatttgttgtcggatttgatacagattttacatcccgaaataggagatttaggcggtttgcgctatttttgcaaattgaatgaataaaggatggaaatatggcatcggattaggaatggtaattgtattactgtttatggctaatctgctgatagggtcggttccgattcccgtatccgatgttttcagcatactcatggggcatgaaggcgagaaggcaagctggagttttattgtatgggagtcccgcctgcctcaagccttgacagcattgctttgcggaggtgcactggcagtctgcggactgatgttgcagaccgcttttaagaatccgttggcaggcccgtctattctgggcattaattccggggcgagtctgggagtggcgttcgtgatgctgttttttggtggaagcatatccgccggaacattcagtttgtccggtttcttttccgtactggctggggcgtttgtaggtgctatgctgataatgggacttatcctattcttttctacgttgttaaaaagcaatgtcatgttgctgataacgggtatcatgataggttatattgcttcgtccgccattgccctgctgaatttctttgctacggcagagggagtgcaatcttatatggtatggggattgggtaattttggcggtgtctctctccaacaaatgcctgctttcgcattggtgaccgttgccggattattcggctctttattactgataaaacctttgaacgcattattgctgggagagcgttatgcggagaatttgggaatcaatatacgatatgtgcgcaactggcttttggtcatcaccggtttgctgactgccataaccactgctttttgcggaccggttgcatttatcggacttgccgttcctcatatagcccgtatggtattgcggacagccaatcacaactccttgttgcctgtgactatcttgagcggtggagcagtagcattgctttgcaacctgatttgcgttctgcccggtgaggcaggtattatacctttgaatgcagttacaccgattatcggagcgccggtcattatctatgtaatcgttagccagaggggaccgcaacgttttaattgacgtgtcgtttcaatcgtttgcatggataacttgcagatttcaagggataatactctttcgtatgatattttattgtatttttgcgcccggtattagtgtttaatttaaacaaagattgtgactatgaaattgcctgaagatccgatgatgctgtacagcttcatcaatatgaaattgcgtgatttctatccttcactggatgcactttgtgaggatatgaacgttgagaaagaagtaattgtccggacactgaaaagagtgggatttgagtataatcctgagcgaaacagattctggtaattgccgtaaacttataaacagatgggtcggggctgtgtcttgtaaagatgcagccccgactttttttgttaataaacgacaaatacgctccgtctcatttaacttcttcccatttctcctttctaaccagtaaaacccggatgaactgatgataaacgaaaacaagattcaacaaatatataaatccaaccgtgaacagggctttcaactgttggtggaatgttttcaggaaccgatatattattatatacggcgtttggtagtgctgcacgaagatgcagaggatgtattgcaggaagtctttattcaggtgtacaggcattgggagcaattccgttgcgagagttcactgagcacatggatttaccggattgcaacgaatgaaagcctccgcttgttgaatagccgtaaaaggcgggaaactgtttcgaccgaagatattcaggaaaacctgatttccagtttgaaggcttccgactatgtggactatgaaaatgagttggccgtcaagttccaggaagccatattgagattgccggagaagcagcggttgatattcaatctccgctactatgatgaacttgattacgaggaaatcgcccgcattctcgacggtaaggcagatacgcttaaggtgaattatcattatgcgaaggaaaagattaaagagtacatactaaataattgagattatgaaaaaagagtttgattttgatgatataggaaaaaaaactccctatcgtgtgcccgaaggtttctttgacgaaatgcagcgtaatgtgcggaaacatacgtatggtagcaagccggcagggcatcgtttgtggataaccgtttctgcgggtattgccatagctgcggcattggtcggctttctgtttatgccgtctcttttcagggaaggtgatagaggagggcagatgctggataccgggaattgtacggcggcggcccctgctgataaatggattcgtgaaatgtcggacgaggagttggaagagctcgtcagcttctccgaaagcgatatatttttaaattaatagtattgtcttaaaaaaaagaagaattatgaaagcaaaattcatttacgtatttctgacgtgccttatgataggcggtcagttcagtctctctgctcaaaaccaggtgaataaagataaaaggcaacgtcacacaccggagcagttcatggaacgccagaccaatcagatggtgaacacactgatgttggatgatgccgcagctgccagatttgtaccggtttatcagaactatttgaaggaattgcgcgaatgcagaatgatgaaccgcaggcagctctcctccgggcagggaacggagcagaaatgcatgaagccgcaacctaaaccggtgctgacggatgccgaggtggagcagcagataaaaggacgttttgcccaaagtcgtaagatactggatgtgcgtgagaagtattatgatgaattcagaaaaatactttctcccaaacagattatgaagatttaccggacggaacagaacaatgccaacaagttgaaaaaagaatttgaccgcagaaaaaagcaggctgttgcgcaaggaaaacataaacacccggtacgttctgcacagaagtcttaagctgccggaaaaactgtggtttaatataataagtgtgtcataatataaaaagctccgttcttttcttttgaatgtagcgaagaatctcctctctgtgtatggcttgacgaggagattcttttttattatcagcaatgctgagagggtaaaataaatataatcgggtagccggttcagaacttcgcaggagagaaattgttgtaggggaatgcagataacaaagaatactccatgcgtttttttcagaaaataaagaattggaaaacggttcgcggctggcatatctggaagttgaagttggtagatgcgcggctttattttgtcagcatgattgtgggattgctgacagggcttattgcggtctgttatcactatctgctttatttcctgctacgtatccgcagcgactttttcgcatcccgccctgcctggtactggcatatactcctgtttttgctgttttgggggattctgatgtttgtgtcctttctggtaggcaggatgcctcttatcagtggcggtggcattccgcagacacgcggggtaatcaacggacgcataacctataaacacccgtttgtggagctggtttccaaattcgctggtggaattctttctgtggctgccggattgtcattggggcgtgaggggccttctgtacagataggctcctatatcggcagtctcgtgtcccgatggacgcatattctgcagggcgagcggaagcagttgttggcggcgggagcaggggcggggcttgcggctgcttttgctgctccattggcctcttcattgattgttatcgaatccattgaacgtttcgatgctcctaagacagccattactacgttgttggcgggtgtagtggcaggagcggttgccggtttggtttttcccgtgaacccttatcatctgattgaggtgtcggaacctgttttgacttttcttgtccggatgaagtatttccttttgttggctgttatcatttccattgccggcaagatatactctgtgcttatgatttcgttcaagcgggtatattctaaggtcaagtctccggtatatatcaagatgttttatttggtactggttgcctacattatctcgttgatgcaggtaaacctgaccggtggcggcgagcagtttttgctgcaacaggcgcagaacggcagtacggaaataatgtgggtgcttgccgtcatgctgttgcatttcgggttttcggtgtgctccgtgtcttcaggcttgccgggtggtaactttattcccactttggtgacgggcggactgttggggcagcttgtaggactggtcgctgtaaagtacggcattatcgagcccccaaatatcacttatgtcatgctgatatccatgtcggcatttttggtggccattgagcgtacaccgcttacggcaattgtgctgataacggagataaccggacactttgaagtcttttatccctcggtggtggtaggcggtttgacgtattattttacggagctgctccagatgaagtctttcaacgtaatcttatacgaggatatgattaactctcccgatttccgtgaagaaaaccggtatacgctgtctgtggaagtcatgaccggttcttacttcgacggcaaggcagtaagcgagctttccttgcccgaacgctgtgttatcatcaatgtgcatagggatggaaaaaacctggtccctgcggaaacaagtctgattccgggagaccaggtgcagattgaaatggattcgcaggacatagagaaactctatgaaccgctcgtcagtatggcaaatatctattagaccagattgcctatttcatccagatttctccggatatcgttgtcggtcagttcatagttttgcaaatcgccggcaaggtacttgtcgtacgatgccatatcgatgaggccatggccggacaggttgaacaggatgactttctcttcgcccgtttccttgcatttatttgcttcgcgtacagtggctgcaatggcgtggcaggactccggtgcagggatgattccttctgcctgtgcgaaaaggcagccggcttcgaacgattcgagttgtttgatgtccgtcgcttccatatagccgtctttcagcagttgcgatacgatgacgccggcaccgtgatagcgcagaccgccggcgtggatgttggcgggagcgaaattatgtcctaaggtaaacatcggcagtagcggggtatatccggcttcatcgccgaagtcgtattggaatttgccgcgtgtcagtttcgggcaggatgccggttcggcggcaatgaaccgtgtttttttgccttcgaggatggtgtggcgcataaatgggaatgcgatgcctccgaagttggaaccgcctccgaagcaggcaatgaccatatcgggatattcgccggccatttgcatttgtttttcggcttccaggccgattacagtctggtgcaaagtgacgtggctcaatacggaaccgagcgtatacttacagttgggcgtggttcgtgccagctcgatggcctcggaaatggccgtgcccagcgaaccctggtggttggggtgagcggtcagaatatcttttccggcacgggtggacatggagggagaaggagttacctgcgcaccgaaggtctgcatgatactgcggcggtaaggcttttgctcatagctgatttttacctggtatacggcggcttccaacccgaagaggcgggcggcataagccagcgaagctccccattgtccggctccggtttcggtggtgacgtttgtcacaccctcctgcttgcaatagtaggcctgcggtatggcggagttcagtttgtgagaccccatcgggctcacactctcgtttttgaaatagatatgtgccggtgtacccagcgctttttccagtccgtaggcacgcaccagcggagtgcttcggtagtatttgtacatttcgcgcacctgttcgggtatttcaatccaggcatcggtctgattgagttcctggcggcagagctcttctgcaaaaacgggatacaaatcttccgctttcagcggttgcttggtggcggggttgagtggcggcatgggcttgttcaccatatcggcctgtatattataccagtaatgtggaatttcttcttccggaaggatgaatctttttgttttgttgctcatagtggttattataaattaaaagtgattctgtgtccaaatgtagctattatttttaaaccaatttcttttttccattgttttttgtttataagggcagatttgtctaagtttgccatgtctcattaaccgatatatttatgaagctctatcataagttctttttgtaccagaataaatggattcatccctatatacgcgtggcgttgggagtaatgacagccttgacgtacctggcgtctatcctgctgattgtcggtctggtatacgaacacggatttaccatttcggcggcagaggctcaccaattgcagcgtctgtaccatggtgtgtggattgtttttctggttgatatatccttacatattctgttggagtataaagatacgaggcagactttcagtatgctgacctggatattgacttttctgctttatctgacgctggttccggttatctttcatcgcccggaagtggaaggcgccgtgcaggcagtctgggattttctgaacggcaaggcctatcatcttgtattgctgctggtgctgtctttcctgaatctgtcgtatggactggtacggttgctggggcgacggacaaacccttcgcttatcctggcggtcagtttcttcattatcatactcatagggacagggttgctgatgcttccccgttctacggtggcgggcatctcgtgggtggattcgctgtttatttccaccagtgcggtgtgtgtgacgggactgacttcggtagacgtggcatccactttcacgacaacgggttttgtaatcatcattctgctgattcagattggcggtctgggggtgatgacgctgacaagtttcttcgcgatgttcttcatggggaatacctctttgtataatcagttggtggtgcgcgatatggtcagttccaattctttgaattccctgttgtccacactggtgtatatccttggctttacattggtgatagaggggataggtacgtttgccatctggagcgatattcatggtacaatggggatggatgtgcacgaagagctggcgttttcggcttttcattctatatcggcattctgcaatgctgggttttccaccttgccgggcaatttgggcaatccgttgctgatgaaggggcataacccgttctatatatacatttcactgctgattattctgggcggtatcggtttccccatattggtgaacttcaaggacattatcctttatcatatacgccgtttctggcgatttttgcatacatgggagtgggacggccgccgtttctaccatctttataacctgaatacgcgtattgtgctgattgttactttcctgctcttggcggtgggcacggccggtatcgctttttttgagtggaacgcgtcttttgcggggatgtcggttgccgataagtggacacaggcgtttttcaatgctgcctgtccccgtacggcgggtttttccagtgtggatttagccggcctgggggtacagactttattgctctaccttattcttatgtggattggcggcggttcgcagtccaccgcaggcggtatcaaagtgaacgcttttgcggttgtggtgctgaatcttgtggcggtattgcgcggcacggagcgggtggaggtgttcgggcgtgagttgtcgcacgactctatccgacgttccaatgctacggtggtgatgtcgttcggagtgctgttcgtgtctgtcttcatcatcagtatcctggagccgggactatccctgcttgcgattacctttgaatgtgtttcggccatcagtacggtcggctccagcctgaatgccactcccttgctgggcagcgacagcaagttgctggtggcgcttttaatgtttgtcggacgtgtggggcttataacactgatgctcggcatcatcaagcagaaaaaacatacgaagtaccagtatccgagcggacagattatcattaactaagtgagatttggaaacagatgtgtggaatgttaacattgattgattatgaaatatattattatcggtttgggtaattacggtcatgtgcttgccgaggagctttcggctttgggacatgaggtgataggtgcggacatcagtgccggccgtgtggatagtttgaaggacaaggtggcaaccgcctttgtgattgatgcaaccgacgggcaggctttgtccgtgcttcctttgaatagtgtcgatgtcgttattgtcgctatcggcgagaatttcggcgcttccatccgggtggtggcgctgttgaaacagaaaaaggtgaaacgcatctatgcaagggctatcgacggggtgcaccgttcggtgctggaggctttcggcctggatcgtatccttactcctgaggaggatgcggcccgcggcctggttcatctgcttgagtttggtgctgacatcgaaacgttccgggtggattccaattactacgttgtgaattttactgtgcccgaaaaatttataggctacaatgtaaatgaactgaagcttgacagcgagttcgggttgaaactgcttgctctgaagcgtgccgagactttgaagaattgcctgggcatctctttcaccgagcatgatgtagtgaacgaactgccggatgatgaccggatacaggcgggcgaccgattggtatgttacgggcgctaccgggatttccagaagttctggaaagcgctgtgacggcaggcggaattattattctctttttttgtagcttttattgcttatccggcaaaatagcagtatctttacttcctaatgccagattgttccgccatggagtaaattccattccgccatggtggaacagaactttctccgtggtggaacaaaatttaccccgtggcggaacgatttaattgaagaaacggctttctctctttgtcaccgtgagaaaggatgctgagtgtagcaatggtgaaaacttagcatcttgaaaagtatgagtgcctattatgaccttttggagaaacctgatattcgccgcaccggtgagcaacaacccctttatgcccgttttgtggctaagggaacgattgatagaaaagagtttatagaccgtgtccacttgtttacgggtatcagtcgcagcgtgcttgagggtgcgatggcagcgttcatggacgagctgcgcgattgcctggccaacggttggacggtagaattgggtgagctgggctattttacgccctcattgagttgccggcgccgtgcgatggagaaagatgaggtacgtgccgcgtcagttgccttgcgcggactgaatttccgtctgggaaagaaatttcacgaagatttaagtggtaagatgaggcttgagcgcaggccgcaacccgccgtgccgctttcctcggataacctttcgtctatggagcgccgctttcaattgctggacgaatatttgcagcggaatccttgcatcaaccgtgcccagtatgcccgtctgacgggacgtagctacaagcaggccgttaacgatttgaatcagtttatcagagacggagtgttggtgagatacggaatggggagaaatgtggtgtatgcaggaaaaaagtgaaaagttttttataggtatatatatctttgtttatcaataacttatttattgttattaatcctctttatcatgactgtaacttactgaaacgacagttaaagcaccatgtcgctttgcgcctgttgtatctttgtattgtgatcacagagaagcaggttttgcaaactgacgagcaaacaaaaccgaaaaataaatttattaatcgtttaaattaaaaaaagttatggcattgaattacgaagtgaaaaagaaagtattcggttttgatcagacaaaaacggaaaagtatgtagcgcaactgaaaacgcttggtataatacagtttggcgatttgtgcgatgaagtcaccaagataggcatggccccgcgtggtgtggtaaagatggttctggatggcttgatagacacattgaacattaacattaacaaggggttttccgtacagttgggtgatttcggttgtttccgaccgggcatcaatgcaaagagtcaggacagggaagaggatgtgaagtcggatacggtttatcgtcggaaaataatttttacgccgggacagtacttcagggagatgctgacacgtgccagcgtgacgagagcaagttgggaaaaaacggaaactgtttcgggaggcggttctgctccgggaaccggcggaaacggggaagaagaaaatccgttgggataacattctttcagtctgcctggaacggtaagcgaaagtaaaagagagggatatgaacttttttcaggaaaggttcatatcttttctccgattgcttgacttcgccttccggatgttgtatctttgtatctctaataaaaaaactttgatgataaatctgcaaaaaaactatggaaaatgaaaatgacttccgtatcagaacgtatacgaaaagagagctggcatgcctgtattgtcccaacacaacggtacggtgtgctatccgtacgctgacgcgctggattaaacgtaacagcgaattgtatgcggaattgctgcttacgggataccacgcaagggtgcggacatttatgccgaggcaagtgggaataatcgtccgttacctggacgaaccttgattgaaggcagattcttaggatatacggatatgcttgacggtaatgagagggggcagaatgtacctgatgttttccttttggtatgctcccttgctgtttttaatggctttcatttgtatttttcccgctctttttgttcctttgcccttgtcaataaaaaaaagaatcaatgaagactcttgtttatatagtgacttgtgtggtgatgttgtcggttatttcctgcacatcgcggaataaaggcggagacgatgtacaggtcttgatgaaagacagcacagtgatatctgctccacagcgtatgcaggtttccgatacgaaagtaaccattacctacaaaggcagagagtaccgctcgtctgttgtccgccgcccggacgagagtctgcctgttgtgacgaatgagcagggagagaggtttatcgacaacagcattgcgctgcgcatcacttgtggcggaaaacagattgtggacaaggtgtttacgaaggaaagtttcgcctcactggtcgatgcccgctttctgaaatatgccattctggaaggactggtctatgataagacaacgcctcagggcattatctatgccgccagcatctgctatccgcaatccgacctttatgtacctctccggctgacggtttccgcggatggcaaaatctccatggcgaaagaggaactgctggaagaggtgtatggggaagatgccgtttccaattgatatacgggtaattccagaatgattccagatttgtgagttttttttgccgacatgaaaatcctgattgtagaagatgagcaagatttgcgggaaacaatccgcacttcgctcctgaaagagaaatttgtcgtagaaacggctgccgattatttttcggccctggacaagataaacgactatgattacgactgtatcctattggacattatgctgccaggaggaagcggtctggatttgttgcgcgagctgaagcacttgcgccgtacggacagtgtgctcatcatctctgccaaggattcgctggacgataaagtggacggtctggaactgggggcggatgattatctgacgaagcctttccatctggcagaactgaatgcacgcataaaatctttaatacgccgccgtcaggcacaaggcgatatgtctgttacagtgggcaatttgttgctctatccggacaaacggcaggcggaagtaggcggtgctcctttgcaactgaaccgtaaggaattcgacctgctgtattactttgtggtgaacgccaaccgggttatcaataaaatgagccttgccgagtcggtgtggggtgataatattgaccaggcagattcgttggatttcatatattcgcaggtgaagaacctgcgcaagaagctgaagcaggccaatgcctctgtggagctgaaagctgtttatggctttggctataaattgtccgaattatgaaactggtatattatacatatcgtaaaatctccttattgctatttgtcctgatggctgtatggggggtattgttttattatgccattattgatgaggttgttgatgaaacggacgatacgctggaaaattatgccgaaatattaatagaacacgtactccacgatccttcccttcttgaaacggagggctcattgatgtctttttataaattccgtcccatctctgaacaggagggaaatcattatcaggaagttttttatgactctaccgtgtatatcgaacttgaggacgagaacgaaccggtacgcgtgatgcgtacggcattccgcatgcccgacggacagttttacgagcttactctgatgatttccattttggaacgggacgatatggtggaggcaatgctctggtatttgggggctttgttcctgctgttgctgatttgtacatcggtgggcattcaagtgatattgaaaggggtattccgcccgttgcataagttactggactggttgcacggcatccagcccggcaaagaagttccggcattggagaaccctacgaagatacgtgagttccgtcagctgagcgaggctgcggtggatatgggcaaccgcagttacaaggcttatgaagagcagaagcagtttatagaaaacgcatcgcatgagttgcagacaccgcttgccatcgtgcgcggtaaagtggaactgctggctgaaagcgacggcctgaccgaacagcagatgaaggaactggatgaaatctattcaacgttgggacgtgcggtgaaactgaataagtccttgctgctgctttcccgtatagagaacgggcagtacacggagtcggaggatgtatcggtggacgagatactggaaaaccttctgcctgatttgatggatatatacgaacataagcaggtgcgcttgctgcgtaagcagggggaacagccttttattatccgctgtaatcattcgttggcacagattctggtttccaatctggtgaagaatgcattgcttcataatgcggatgggggagagttgcagatactcactactccggattcgctggtaataaagaatacaggtgatactcctttggacggtgagaagttgttccgccgtttctaccatagtattgacggaaagaaagattccaccggactgggactcgccatagcccgttccatagcccggatttcttttttgaggcttacttacgaatggcaggatggaatgcattgctttctacttgttaaagaaaataaaaataaccgttaacactgattattcccaaatctttcctatttctctgtcgttatttgcagtgtgaatgatatgaaacaaatcagtaacattaaaaaataacgattatgaagaaagtattatctatccttgtgttggctcttgtagccgttcagttggcatttgccggtgatgtcattacgcgcgatgccaagcagttgcctttgacagcccgtaacttcatcaaccggtatttcaccgatccgcaaatctcgcatatcaagattgaaaccggaatactgggctcgaaaagttatgaggtgctgttgaccgaccgtacggagattgattttgacagcaacggaaactggactgatgtggattgcaagaaggctgctgtgcccgaagctctgattccggtatctgtgaaagagtatgtaaagacgaacttcccgcaggaggtcatcaccaagattgaacgcagacgcagcggggtggaagttgaacttgccaatgactattccttgaaattcaacagcaaaggaaaatttgtaggcatggacgattgattgtaatactgcagaatgtataactttaaatttttttgccaagaagatgaaaacaaaaattcaagtattagcgatgatgttcattgcggcaatggctttcggtgcgtgcgatgatgacgacaaaaacgataatataaaagctcccgatgccgtgtcgaaagcccttaaggacaaatatcctgctgccatggacattgaatgggaacggaaaggcgattatttcgtagccgactgttggatggacggcagggaaatggatgtgtggtatgatgttcaggcaacctggaaattgacggagacggatattctttgggaaggtttgccgcctacggtacagaccgctttcgaaggcggagaatatgcgcagtggaaacgggaagatattgatatgcttgaatatcccgtacagcctgtccagtatgttatcgaagtggagagaggtaatgaggagtatcagttgttctatgccggagacggtaatttattgcagaaacgtgatgtaagtggcaataaggacgatacgcactggccgatagatgagctgaagaccgggcgttaatcttgtttgattgaggtataaccggaacaaaatgaagaatctcttctccttacatattaagagaagagattctttattttgttttgagtaagttggacgtgcttttgtctctgactgctacatcggtttataatctttagccagtccgccttcacttgtttccttgtaaagcgacggaaggtcgtttccggtttctttcataactgctactactttgtcgaaagatacccggtgcataccatcggtgaaagaggagtaaaggttggcatccaaggcgcgtgcggcggcataggcattccgttctatacaaggaatctgcaccagtccgcataccgggtcgcaggtcattcccagatgatgttccaaacccatttccgcagcatattctatttgtgcggggctgccgccaaaaagttggttggcggctgccgaagccattgcacaggctacgccgacttctccctggcagcctacttccgcgcctgaaatggaagcgttggtctttactatgtttcctaccaacccggctgtggcaagggcgcgcaagatacgcgtatcactgaaatcacgacttttggaaaggtgatagagtacggcaggcatcactccgcacgagccgcacgtaggagcagtgacgatgacgccgcccgaagcattttcttcacttaccgccaatgcataggcaaataccagtccgcgcgattgcagggattgtttgtatccgctggcacgtatatagtaagtggaagctttacggcgtagattcaacggaccgggcaacacaccttcctgttccaatccccgtttcacggcatcctgcatggttttccatacttcttgcaggtaatcccatagatcgctgtcttcacattccttgacgtattcccaatagctctttcctgtacgttcgcaccattgcatgatttccgtcatgctgctcatggaatacacatcgggtgtattgaccgaggatgctccgtcattctcttctgccagagcgccgccgccgatactgaacactgtccatcggtcggtctcttttcctgctttgtcaatggagacaaacttcattccgttagggtggaaggggagaaaaatcttaggctcccagataatctctaccggtgctatcggctgtagcacttcggtaatggcaatgttggtcatgtgacccttgcctgttgccgccagactgccgtataatgttactttgaacgatgcagcttccggatgtctttccagaaatatctcggctgccttgcgaggtcccatggtatggctgcttgaaggaccggtgccgatgcgatatagttctttgattgatttcatcttgctaatgggttattggattatttgtttatcaggattgttaatattgtaactttgcagttttctgttgctcgatttttaaatttcaattagcttaagtctacaaccgtaatccccgctccgccaaattgaatgtgctcatcggcaaaatggcttacaccgggcacggtttgcagatattggcggataagcgtgcgcaggatgcccgtaccggttccgtgtaggatgcgtacgcgtgacattcctaccaatatggcatcgtctatgaaataggtcacagcctgtagggcttcgtctccacgcatgccgcgtacatctatatcttgcttgaagttcagctttttttcgtacatgctgtcttgcgtctgagaactgatataggtactcttggtagagacatccacttgcttaggctgcgcatttgtccgttccagcctatccagcttgactgtggttttgatacttccgaacgcaacgatggctttcttgccgtttatctccaatacttcgccgactgaggtctgtccttttatcttgacatagcttccgggtacgattgctgccagacgttcggcttctttctttgcctgttgctctgccaacgcttgtgcagacaatgtattttcctgattcttgttggctttcttctcctttttccggttttgtttttctttcagtttttctattttgcgggcaattttttcttcctgctccttagcggtgagggtgtccagcgattcgcggaaatcatttaattcctgccgtatctggcgtgtcttttccttttcggcctgcgcttctttaatggcgcggatggtgttttctatgcgggcattagcttcctgcatcagttgttccgcctcctctttggctttctgcagaatttccttgcgcgatttttgcaactcttctatctctgtctgataacgggcaatggtttcctccatatgcttttcgcgttgccggatagtctgacgtttgccttcccaataacgtttgtcgcgtacaatatcttgcaggtacttgtcggcattgatgtattcactgcctacaatttccgaagcatcggagattacatcttccggcaatccgattttacgggcaatctctacggcaaatgaactgcccggattacctatctggagctgaaaaagggcttgcatcaaatggcggtcgtataacatggctccgtttaccaccccatcatggtcttcggcaaaatgcttcagattctggtagtgtgtagtaataacgccgaacgtctgcttttggttgaaacgtttcaacactgcttcggctatcgctccgccaatctggggttccgtaccgccaccgaactcgtcgataaggatgagactgcgttcgttgcagtttttcatcattatcttcatattggtcaggtgcgaggagtaggtgctgaggtcatcttcgatagactgctcgtcgccgatgtcaatgaatatattgctgaatatgccggcatggctacgttcgtgcatcgggatgagcagaccgcattgcaacatgtattgcagcaaccctacggttttcaggcagacagattttccgccggcgttgggaccggagatgatgagaatacgttgtttttcgtccagctctatatccagcggtataacttttttcccatgtttggcaaaagagagttgcaacagcggatgtaccgccattgtccagtctataacctgcttgttttcaaaagccggtttcagtccggtgatttgctcggaaaacaaggccttggcacgtatgaaatctatttcggcaagaaattcatatgacagcaaaacatcgggaatggatgggcgcaacaaattggaaaattccataaggatgcggataatctcccgccgttcgtccccttcgagttcgcggatgcgattgttggcttccactacttcggcgggttcgatgaatacggttttaccactggcggattcgtcatgtacgatgccttttatttttcgtttcaaggctggagctacaggaatcaccagtcgcccgtcgcgcattgtgggggttacgtctttgtctacaacaccttccgattgggcattgcgcagaatgctgttcaatgagcgtgagatactccccattgtacttgccagttcgcggcggatgcgcgccagttctgccgaggcgttatcctttatttttccgtagggagaaagaatgccgtttatttttccgataagttgcgggaataccgttatgtctcctgccagtcgcttcagacaaggataaggagatgtggtttcctcctcttcttcattttcgcttttttgcaaaaagcgtacaatgtcgcgtatcgtttctaaagagcggcgcaggtcgaaaagctcctgctcgtccaaatacatgccttccacccgtatccgtttcagggacggacgtacatcaaaaaaatattgtgccggaaaattatcttcttcttgaagtatacgtacgaattctgtaacctgatccaggcgttcttctacttcattaaagcggtcggagaacaccatatctgtcactcgctcttcgccaagcgtactgagacatttttcttttagcagttggcgtatttggtcgaagcctatcttctgttcaaagttctgtgggtatatcatgggtacaaaagtacaattatttcgtgaaaaaacgggaaagatgtttgcagatttaaaaatgatttgtacctttgcaccgctttaagagagaagcacttcttgaaaaagaagttttggagaggtggcagagtggtcgattgcggcggtcttgaaaaccgttgtgctgcgaggcacccggggttcgaatccctgtctctccgctgaaacaaaaacgaaggacttcacaaaagccttcaaaaagtcattcaaagcaccgtatatcagctgattacggtgcttttttatttttgcgccccaacaaggtgaaggcctgaatgtagggtttagccttcaaagttcggtcattatttgctacatttactgctacactttgaagacccctcaaaaaaatgtagcagtgaccgaaaaatgaagcccattttgaagcctataaaatcattgattcataactgattatgtagaactttgtagccatggtgctacattaaatttgagtcgttatgagaatgatttttaaagtgtcgtactatgtacgttcaaactacgaaaacaagcagggaaagtctcccttgatgatccggatttttctgaatggtgaaatgctgaatgtcggttcttccggtatctacattgacaagaagctatggaacaattccaccaaccgggtaaaggggcgtggaagcgaatccttgaatctgaatgcccagttggacaacatctcaaattcgctgcagatgattttcaagaagcatgaatttgacgaagacctgacccttgacaaaatcaaaagtatctttttgggcaagaataaggtcaagactacgtttgtggagttctatgacaagtatctggaggacatcaaggctcaggttggtgcaggtaaaagcatagccttgtatcacaaatattcggcagcccgaagccattttgtgaatttcctccatgccaaatacggcagaaaggatctcatgccgggtgaactgacgcatctgattatccatgattttgaaatatacctgaagacagtggtttccctgaagtcaaattcggctaccaagacgcttaaattcttcaagaccgtagttatctttgcccagaagtgcggtatgatgacgcacgaccctttcttgaaccaccactttcacctggaaccggtggatcggggttttcttacggatgaagaaatacagcgcatcatgcagaaagattttgagattcctcggcttgaaatggtaagggacgtttttatcttttcctgtttctgtgggcttgcctacatcgacgtggctcacctgacgcaggaaaatatcatcacccttgataaccgtccgtggattatcatcaaccgtcagaagaccaatgtgcagagtaatattcctttgttggagatacctcaaatgattcttgacaagtataaaggaaagactaaagacaacaggctgcttccagtcctgtcaaatcaaaagatcaatgcttatctcaaagagattgctgacctttgtggaatcaagaaacgtctcagctaccaccttgcacgtcatacgtttgcaacaatgttgctcagcaagggtgttcccattgagtccgtttcaaagatgctgggacataccaacattaaaacaacacaaatctatgcgcgtatcaccaacaagaaaattgagcaggatatgatgcaagtcgccgacaagtttgatggcttcaaaaactgtttcatcaattaaccgacttgcttcagttcaatccttacttcgagggaaaagacccgttacacctttaccaagccgtatcattccaacaggaagatacggctttttccatattgtacctttcctcatcccacttttatccgtccgaatgctgccggaacagattgccggaaataaccagcacaaacgcaagcgtcaccagcttccatatcaagacgaaagttttctttaccagccataatgccaaccgcagcattacgcgaataagccaaagtgccaaccgtatcagcaaaccgataagaatgcagaccggaaacatatatataaggagtaaaagttcaaacatggtcatctgtttttagttataaaaaatccctgccgaggtagattgttattaccaaatatactaaaaatcaatgggatacgcaagaagccgtctgtattttattcgtgtcaatacatgttttttcaacctcattttctgcattttatgaccatgaactcggtgcttgtcaagcattgtcactctgcaactttgaacatcatgttgattgcccgaagttttgaatgtccagaatgtgtttgttctacaatacgattacaccttattctttttatccctccgggttcagttccataattgccagtaccattgttcttttttcccttttatcacagaacgcatgtttacagattttcattgctgaatgctcttttccttgtgttgtcatggctatttggatgacaagcaaatataaacataggttgaataaagactgatgccatagctatatgtcctattgtctttcagctaatggccacatggcaatatgattgcacattcttctgtttacagatttgttgttcctctgtctcttgtttcactcattatgaaaactgtgcaacaccaatcaaacaagcgcaggatgatacagccatgtaactggcatgcctccgacagctaaacttcaaacattgtttctatagccacatgaacaaccgtcagtttctacttcatgcttcgtgaacatttcaccatgatatggatgaacaaggagtcaatgaacaggagctttggaaacctttgaatgcaagtcccagaatgcttgatacacaggtgaatttgacagaagattttctctcagaaagatgttgtgcatttttgcgcttcgcaaaattttgcggtaatttgggtctgaaatcatcccggaagacatcgaactgcgttgcatatggagccaagcaagttgtacccttgtcattacaaaacaagttttgtcctcacaagggtaacttgccgactgccgtgcagcggagcgatgtgcatcgctgtttcgcttcgcgaaagaggtgtccgggaatccgaacaactaaagtcaaggcatatgaaaaaccagcgtaccaaagtatttcagttacggcttacctccgatgaattgctgaatctgaaggaaaaagccgttccctaccagtccgtgagcaattatatccgcaaagcagttgaagaatttacccatgtggatgtcaaacaacagattgagatgatgcaggatttgtgtgcattttaccgaaagttccagaacgaactgtcctgggctggcagcaacctgaatcagtcggtcagacgggtcaacgaactggcggttgccggactgctgtcacccggttatgtgaatgaagtcttgctcccttcgattcaggatgtacagaacatcttgaaaaggataaaggatgacttggaaactttgaacaacagaacacggctgattaagtaaaggtaaacggatattttgtatttgggtgtgatgaatagactaacctgtatccggttttacaagcgaccgggatttttaatctgtctggtccgcaaccccaaatttcatgaatcagcaaacaaatagataaatcatgatagcaaccatacttcccggaagcgcagacttccatgcagtcggttacaacgaacacaaggtctataaaggagtggccaccctgctggagatgcagaacttcggtggactggaatcctcggaacatccgaccgccaaacagctggtgcaatttctccagttctacagttcccagaacagccggattcagaaaccgcagttccatgtagccatttcctgcaaaggccatgaaatgtcggaacagcagttacttgatttcgcgcaccaatatctgcaggaaatggggtatgccgagcccggacaaccctggctcatctatgcccatcacgatacagacaacactcacttgcacattgtgacttcgagagtggcgcccgacggtcgcaagatacagcatgaccatgaacgtagacgctcgcaggcggtcattgacaagatactcggtatggaccggcagcagaaaacagacaaggacatagaggctgccaagcagtacagcttctcctcctttgcccagttcaaggccgtgatgggaaccatgggctatgaagtcttccagaaagacggaaacgtcttcgtcaagcaaggcggccgaatccaaaagaaactccccctgacagagattgaaactctatataagaaaggttatcaggacaaggcgcgcaaccgacagctgagagcctatctgaaaaaatacagggacgtatgcgccaacaaggaagaactgcagaaggaaatgaagaagagcttcggcgtggatgtggtcttcttcggcaagaaagacaagccctacggctacatgctgattgaccatgccaacaagacggtcattcatggggccagagtccttgccgtagaagaactgctggactttgctactcccgaacaacgctttgaccggatagaagcatttatagaccagctgctgaccctcaatcccaaaatcactcagggagaaattttccagaaactcaagaaacagcgtgcctatataaagaaaggcgtcatctactacgatggccaaagcagacccttgccgcctttcatggccaaggctattgaccggaacaaccgcatcagcttcatcgagaagttccgtccgcagaacgaagccgaagtggaaatgctgtgcaaggtattcaaggtggaccgtccggatctggtggacatctctacagaacgtcctcccaagtatgccgattccgtcggccgaatgcatgaaatcttcaatgatcccgaagtgaagtccccccgcagcgccatgtaccaggaaggcttcatcatccgtcaggtcaatgatacctactatgccatcaacttcaaggaacatattctcattaacctgaatgaagaagacttcgatgtggaacgggtgaagaaaaaatccaagaagccaaagcgccagggagtgccgtttaagaagtccaagaagaagacgctcaatccagtcaagagtttgcagcggaagtcccatcaaggactgggcaagctacggaaagaaggtatcggcagtcacagcgccaaccgcgaatgggaggtagggaaaaagaccgactacgatgaggtggatgatggacgttcattaaagatgtaaggaacttctggtcctttgcggaagaaggaaacacttgcttacgggaaagtaacattgttttgatcatgcagataaacggctctttgtgaaacaggatatggctataatccgtaaccggacaaccaatggggtccactattattttgaaagactttcatgggactgcctattgcaaccaattcgggcatatagactgaaaaactcaggtttatctgacttatttacccatgtttctgcaatctcaagcacattgatgttgtgcatttaggttttcaatatctctgcacatatttttgcttgcaaatttaactcaagcgaaaaacaacatgatacagacccctgtcatagtaacctttgccaaccagaaaggaggagtcggaaagacaactctttgtgtgacctttgccaattacttggtgacgaaaggtgtccgtctggtagtaatcgactgtgatttccagcactcgattatgaagtgccgtaagacggaccttaaaaaatatggagaggaacaggtgccttacgaagtatgggcttatgaaccggatgacaagacggccatgacctccctgattgaaaagttgcataatgatccggagattgatgtggtgcttatggattcaccgggaagcttgaaagcggaaggtctggtccccatgtttgtcaattcagatattatcgttgttcctttccactatgatctggtgaccgttccttccactgccagttttctgctttttcttgacagacttcgtcaggtagttggagaccgtatgaatgcacagctcttcatcattcccaacctcaatgacaaccgcgtaggaaagcgctcagaactgatactttgggacaatacacgggaaactttttctaattacggttatgtaaccgggaaaataccgaggcgggctgatatggagcggttcagtacagtggctgcactggatatgcagattcgttatgttggcaatgttttcgacaagatctatttcagcattttcggcaaggtaactccagtgagggaggtaaagcttaccggaatacaactgacggataatcttaatccgaaaataggcaagaaaaaaaatcgggaagaaggtgttacacatattgccatggatgaagatggaaatgaagaagaacgcgaagcaggaggtctgtctgctgatacaaccgataaggaaaaaacggaatatgaatgacgagattaaatttatcagtaaccatcaaataacatagcgcatgaaaaaagacattccggaaattggtgacttgacacaaggcatcaatgattctgacattatcctgacgcacaagttgcccgaaatgttggaaaaatcatccggcctccaggatcggacgaatggtacaagtgagaagaaaacggaaactgacggagaacctatccatctttctccctcaaaggaggtggaagattattggacaggatttctgaaaaatttggaaatctccgatgaaagtaatgtcaaaagcgaacgactggtatgcaggctggaccgggatctggcagactcgctggatgactgcaacatccataaccgcagccgttcggatatggtcaatgccattgtccgtacattctttgatatttaccttctacagcttgtgccgtttcgcagagaaaagaaatcattgtttacaaatttcaatcaaaaagattatgagaaagaaaaggactaattggacagagcagaagattgcggttcttatccagctctatcccatagaaacaaccctgagaaccgcagaggttttgggtatgtgcgaacgtgctgtaaaagaaaaggcccgcagtttggggctgaagaaagcggtcaaaagccgttggatggagcatgcagattatgtacgcaatcattttgctcaccggtcttatgctgagataggcaaggaattgggaatttcacgggaatatgcccggcgcattgctgttagaatgggattgaagcgtactgcgttggaggattttaaggtgctttcacgaatccattctgatattatgcggagggaaagacgcagggttatcttcgggctgagtcccatcacccgcatcaaggttgtgtccaaccgggcacgggtaagactccgttcatggctcaagtccaaaggctacattgccggagaggaatacggtatcctttattatacggatgaccttcaccggattcaggaatcagagttgagaggagccaaactgggcttccgcttcctgccttatccgtcagaggaaaccattgtattgtcaaacatcctataactacagctatgacctacggacaagtaatcttaatcctctttgtggtcttgataggctactacggctttctgatattcatggacatccagcatctgaaggcagccgaggcagcagcgcaggagaatcaatccgaagaggaaatagacatcacggatgaagcccgttccttccagccccagcaggtgatccgggacgataagaagaaggaagaggaaaagaagcaggaagaagcagggaatgaaaatgattccaacacggataaacagcagacaacatctgatgagcaaccgaatgagaatgcttcttctgaaagtggtgaagatgtttccaatccggaagcatcaacagctaccgaacaatcagatattcctgttccggcagagaatccttcctctgaaacagtatcacagattcaaactgctgagccggataatacggatgccacatcagcttctgatgctacggataaagatgaaattgaagacactacccatgcggatgccgaagcagccccatcggaagctggaacttctaccggatccaacttctcaccgagctaccgggaacccatcttgacagacggcatcctggtggatgacatcttcaaagccatcgaccagttggccgaaaccggtgaatgtgacctgggtaccattatctatcactgcgaaagcatgcgatatgccgggtaatacacccgatactacttggacgaaagtccaccgttcctttagcgacctctgatacttgaatgacctctgtttctttggcgacctctgttcctttggcgatgaaatccattatcaaagaaatatacaatgaaacaactcaatcaactcgtatgcggaaacgaaagcatcttccgctctatccagcgttcttctgaaaaagcagtcaaccgccttatggcctgcagtgtggtacagaaatgcctcatgttcatctttgcccttacggtatcggtcggtgaagcgatggcaggcagcaagggagccgcaggctttaccaaagccacccaggaagtgagttcctaccagactccggtgtcaaacttgatgaaagcgattgcagccgttatagttttagtaggagcttttaacgtttattttaagatgcagaacggcgaccaggatgtcaagaaaactatcatgctgaccattggcggatgtattgcatttatcgctctttctgaggctcttccgctcttctttaagtaatccaatctgtcaacattctatccagaattatgacgatgaatcaggagggttatcccgttttcaaaggcttgcagaaaccgctggagttcatgggcatacgcggtcgtttcctgactttggcagcagcggccatcggtgtgtcattcgtgggttttatcggtttctccatcgctttgggaaagcttgccgggttcatcgccatgctggtgatggcagtggtcggattggtcaccatttacgtcaagcagcgtggcggtctccacaacaaacggcgggcaaagggtatctatgtttacaagaatctgagacgcaactcgtaaaacaaaatgaatgattatggcacgtaccaagaaaagaatatttgacggcctttatgcgcagctggaggaaacggacggcaatgtcgtccttttttcagccaagggggaaccgtcggttattttcgagataaccaatcccgtgcagcagctttgtaccgatgcggagcagtacatgctctttcaggatgtgctctccaatgtggtacagacgctcggcgagggttatgccctgcaaaaacaggacgtgctctgcaagcagtcctaccaccatgaggtgccggaggatgcagagttcctgaccaaaagctatttccgttactttgagggaagagaatttacggagatacgtacctaccttatcctcacgcaggaggcacagcgcagccagttcgtgcagtacgacccgaagaggtggctggacttccattccaaggtttccaaggtgagcgacatcctcaaggagaagaacatcaagcaccgaaagttgaccaaggaggaagtcaatgagtattgccaccgcttcatggccttccagttccggcatggtccgttctcgatgaccaacttcaaggcatcagatgaatatctgaaaatcggcgaccgggtagtccgttcctatccgctggtggatatagacgagattaacctgccttcgctggtgaagccctacacacagatgaacatcaacggttacggcatcgccacggacctcttttcatttttgacaagtgtgccccatgccgattgcgtggtgttcaaccaggtggtacagataccgaaccaacggaaactgctgagaaaactccaggccaaagccaagcgccatggctccatgcccgacccgagcaacaagattgccaaggaggacatcgaggaagtgctggaccgcctggcggtggacagcacgcagctggtctattgcaacttcaacattctggtaagctgcccggcagacaaggtaactccggtcacttcttatctggaaaccaagctgtacgagtgcggtatcatgccgtcccgtaccgcctacaaccagttggaattgtttacagacagcttccccggcaacggctatgccttcaatccggactatgacctctttttgacgctctccgatgcagctttgtgcttcttcttcaaggaacacttgaaaggttcggaagataccccgctgactacttactacaccgatcgccaggggctgccggtgtgtattgacatcacagggaaagagggcaaggtgaagatgacggataatgccaacttcttctgcatcggaccttcaggaagcgggaagtcattccacatgaacagcgtggttcgtcaactattagagcaaaagacggatgtggttatggtcgatacgggcgattcctatgaaggtatctgtggttactacaagggaacatatatctcttactccaaggagaagcctatttccatgaaccccttcaaggtcacaaaggaagagtatgaattgaacttcggggaaaagaagaacttcttgaagtctttgatattcctgatattcaagggtaacgactttccaagcaagattgaggacatgctcatcaaccagaccatcgtggaatactacgaagcctacttccatccctttaccaagtttacggagaaggaacgtgaagggttgagacaaaagctgttggttgcctccaagatggaagaagactatgataagttctcccacagcatggaagacattgatgcccaaatcagagaagccgaaatggacaagcaggcggaaagcagagcactcatgcttccggcagaagcccggcgactcaagctgctccgccagtgccgttcgctctatgcccttgcccaggatgaagctgccagcaaaggcgaaaaggaacgtgccctgcagattatcgagaactacaagaaggaactctacaacaactccatgcttatcaagatagacaagcagatagaccacatcgaggaacagaaacgccgactgaaagtccgggaactgtccttcaactcctattacgagtttgctttggaacgtattccgcaaatcgtggcacaggagaagattcagttcaacatccgcgacttcgctgccatcctgaagcagttctaccggggtggcgaactggagatgaccctgaactccgacctggacgtgaacctctttgatgagcagttcatcgtcttcgaaatcgacaagattaaggatgaccccgtgcttttccctatagttgttttgattatcatggatgtgttcctgcagaagatgcgcatcaagaaaggacgcaaggcactcatcattgaggaagcgtggctgtgacatgtaagtcttgtatatgattgttcaactttcattccacgagttggaaatagaacgattgaacctgttgttccgtcaacagtagcctatgggaacgtgcggtattaagcaatgaacccgtgcggtaacagaaccaacaatgaagcccttccgaaaggagaagtctgaaccgtgaggggatgacaactgccgttagtatcgaacgacaggggagctaggctgaatggtatgaataacgtaatgtgaaccgttgataaacgtcgtaacttcgaatgagctgctaatgatactgggctctaacccaaaagggatgcagtcggataaccttctccatgctaaggttacacggacataacgactgccggcggatagacggattctaacccattcgtttgtcatatacaagaaacatggtaaacccgtacttctcctgttaacagcaggtaagcagaccgtaagtgaagccgaatggagtgcgggcagaggaatgcggagaaagcgaatgccgttctgtaacggaacggatagaggttgaaacatcacctcacacgaaagtgggcagacttccgcatggtggatgttttacaagaaacttatagaacttattaaaggagaaaagcaaatgaacgagattaaaacatcgtgtgcatctactgaccggaaatggagcacttgggaaagcatagactggaacaagtgtgagatagcggttaataagctacaagcacgtattgtaaaagctcaaaaggcgggcaaacacggcaaggtgaaatccttgcaatgggtgctaacgcattcgttttacgctaaagctttagccgtaaagcgtgttacatcaaacagtggcagtgacaccgcaggcgttgacaaggtgaaatggtcaactcccaatgccagattcaaggctatcggtgaactgaaaagaagaggctacaagccccagccgttaaaaagggtcaatatcaaaaagagtaatgggaaactacgtcctttaggtatcccgacgatgaaagacagggctatgcaggcattatacctgcttgcgttggaacctgtatcggaaacaactgcggacagtaattcctacggtttccgtaaagagagaagtactggagatgcaagggaacaatgtttttgtgtccttgcaaagaaaacttctcccgaatggattatggagggtgacatcaaaggttgtttcgaccacatcagccacgaatggctgctgaacaatatccctatggataaagtgatgctgcggaaatggctcaaatgcggttttgtcttcaacaaggagctattccccacggaagagggtaccccacagggcggtatcatttcaccaactcttgcgaatatgacactggacgggctgcaaactatgcttgcagagaagtatcacaagaaatttgtaaacaggaaaacgacctactatcccaaagtacatcttgtacgctatgcggatgattttatcatcacgggtagaagcaaggaagctttggaagaaatcaaaccgttagtagtagactttctcaaggaaaggggattaaccctgtcggaagagaaaacaaagattacacacattgatgacggatttgattttcttgggtacaatatccgaaaatacaaaggagtgcttctaatcaaaccgtccaaaaagagcctgaagaaattcatgcagaaaatccggggaatcattgattccaataaaggaagcaaacaggaatcacttataaggctcttgaatcctgtgataacaggctgggtaaactactataagaattgtgtggcttctgacacattcagaaaagctgactacctgatatttgaaaagttgtggcaatgggctaagagacgacaccccaagaaaggcaaatactggattgccgaccgatactttacacgggtaaaaaaccgcaactggtgcttcgtggcaaacttcaagaaaggcaagactgatgacaggattgcactgaaaaggctgtatgacacaaagattacccgatatgtcaagataaaaggtgaagcaaatccctttgaccccgaatggacagagtattttgaaaagcgtaagacttacaagatgctacagtcgctcaacggtagaaaatcattgctgtacatgtgggaaagacagaaccatttatgtcccgtatgtggtaaacccatagacaaggaacatccttggggaacttcccaacaaatagtcaatggcaagaaagtaaatttcctgctgcatgacagctgtagaagaaaagtcattcaaactaataagatgtaactatgagctggtttctattaaatagaaatttaacactgcttgagccgtatgattggaaactttcatgtacggttctgaggggggaaaggggcagtaatgcccctgacctacccggcaaggcgattgcttcgcccaccatggcagaatatataaaatatttgtacaaaacagtcagaaagttccacggcatagcaggtgtcgttacccaggagttgaacgatgtgatagattcgcccatcgtgaaggaagccatcatcaacaactccgacgtgaagatactgctcgaccagaccaagttcaaggaccgctacgaggacattgccgccatcctgggactgacacccatccagcggcagcagatattcaccatcaatgccctgaacaaccgggaaggacgcagctacttcaaggaagtctggatatgccggggacaaaactcggatgtgtacggtgtggaggaagcaccggaatgctactgggcctacaccaccgaacgcatggagaaggaagccctcaaactctatctggcccactacggaaccatgcaggaagccatcacgcacatagaggcagaccgcaaacgggacggcgggcataagtatctggaatttgccagaaaagtcaatcaacatcaaaaagtcatgtcattatggtcaagttaagattcctgttgatggcggtactgatgattgccgcttcaacgcaaatgtatgccggatggcgcatcgttgtggacaagaactgcatcaaaatcgtgtcctccaaccttgccgcccagaaactcatcgaggaacagcacaatgcccggctggacaccatcgccgccaaacagcagaaggtggaactctattcggtcagcatggccacgatgaaggaactctacaagctgtcggtgcagaacatctccggtttcggcatggagagcctgtactacaaggaaatcggcagctgtgccctcgacatcatccggaacgtaccggaactgattaaaacggtcagcaaggccaagttcaccaaccagctctactgcctgacggaactcggagggctggtgatggaaacacagcagctggtcggcaacttcgtgaatatcgtaaacaatgcgaagatacccaatccgctcaagggagaaggcactgccgagaagaagagcgacggctacaacatgctcgaccgttacgaacggatgtcgctggccaactccatctacaccaatctgaatgagatccgctacaaggtggacggcatgatgctcatggcacagtatgccacgctgaatgacctctgctttgccatcgatcccgagggatgggccagcattgtcaccatgaaaaaccatgtggacggactggtatcggactggaacggactggtggctgctaactaaaagatgaaaaagctatggaacactggaaaaagaaattgggcgctgtctgcctggtactgtccctgatggtgccgggtacggccactgccgtggtcatacccaaggacctgccgaccattgaagcgctgatagccctgcacaagtgcatcaagaaggacgaggaccaggcactgggcagagtggccaccagtttcggggaacagtcgctggtgacgaaaggcgccaacaagttcaacgaggtgcggaccacgttgaacaccaagatgagcaatgcccattcatatttggtactggccggagccatttcctccaccgccaactcgctctacatgctggtaaaggaatacaaggactttacctccaacactttcaagcatgtcaagaagaagccctttgtgggatggtactatgccgatgccaacatggcgatagcccgggaagtgcagcactgctacaagctctacgcttccgtggccgcctcgggcatcaacctgatgaaggcttccatggacgagaagctgaacttggtgatgaccctcaaagccaccatcgacaaggcccgctacatcgtggacaatgcgaacctctactgctttctcatcaccgactgcggctggaagcccgactacatctgggaaatactcaactccaacgtgaaggacgagatagcaaatcgtgtcatcaatcaatggaacaaaggatatgcggtatagaattttattactctgcttgctgggcatgacgatggcttccggtctgcatgcccagcgtccgaccaaggacaaggaaaaggcccggcagtggcagtccatggagaacggcccatgggatttcgcaccggactggtactacttcctgctgcacaagaaatactcgggtgcggaaatgtactggaagtgggcaggattccaatccggcttccgggtgcgcttcaaggagcacaagtccaacgtgaagcgcatcatgcccacccgggtaacggcggaagagacccagcggcagaaaatcaagaaggtggaggaagagcgccagaagatggaggaactctatcaggaggaactgctccgcgaggcagaccgcaacgtggatctgatgtttccttcctacaaggacgagttcaaccggatgcaggactgtatcaccgacggactgctctactgcatgcagaaaagcaagggcaagctccagtatcaggtggacgaactgagccgtcagaatgaaattctctgtgccgacatcgcctacatccacaagatgggagtcggttacggactggagaatgccaagcggcagaaggcttacgaggaagcccgacaaaaaatggaggaactggtcaaacggaccgccaacctctgtgcggtggcttccacgcattattgacatacaagtttaggaatgagattctttgagaaaatagtttgtaacaaaaatagaatgaaatatgaatctactgttagtaccattaaccatcggattgcctgccattgacgagagtctggataagctgctggtcgccatggaaacctttcccaatgtggcggtgctgggtgatgccatcggactggcacgcatcctcggcctgttgctggcgctctgtgtaggctcctacgaatgctggatgatgatgctcggacggcgcggcatggacgtgatgaaactcctgcgcatcatcggcatttccatctgtatctcttcttcctcgtggatctgtcaggccctgcaggttcccggcaaaggactggaaaccgctaccaaggccatggcaaaagccaagaacaaggaggtggccgctttcgaactgaaggtggcacagaaacagagtgaatacctcgaccgcttgcgggaggtacaggactccatttccaccgcccagcaggtagccgccatcggacaggatgctgcctggtgggacaagctcatctacaacgtggagaatctgggcaacaccatcaacaactatgcgcagcgggcagcggtggcggctgaaaccaagatgagcgaatggatcaacgatgtcatccgctttgtgggggaactgatattccagatgtcctactacggcattctggtggcgcagcgcatcttcatggccatcatgatgattttctgtcccatcatgtttgccctgtccctggctccgccctggaattcggcctggagccagtggatgtcaaagttcctttccctctcgttatggggcttcgtcacctatatgtgcatctactacatcgacttcatcctgctctataacctgcagcaggacctcatagcttacaaccacctgcttcacggttcggtaaactcctgggaacagattggtgcactgggactgcagggtatcggttccaactgtatgtatgccatggggatgctggtgggtgcctatatcatccgctttgtgcccgaagtggcttcctggctgattccgggcggtgtcagctccggtgcaggttcagcagccggcagtaccgtgatgggcatgacagcgatggcaggaggtatggcaggaagtgtggtcggctctgcagccagcggtgccgcttctctggtcagaccgggcaaatccaagaacagcaacaacaagaagtaatcactcaaaccattccctatgcttatagaatccttagcacagaaaacgaaactcgccctgatgacggtgctggccacgataggtggctgcaccctcatctgcgggttcaccgtctggtgctgcatctcgctcgtgacgaaagaacgggagcagatttacatactggacggtgacattcccttcctggcacagcgtgcccagctggaagcgaacttcacgatggaagccaaggcacatatccagctcttccatcagtatttcttcaacctgcctcccgataacgactacatcaagtggacggtcggcaaggcaatgtacatggcagacggtacggccctcaaacagaagcaggcattggatgagaacggattctactccgacatcatctcctcttcagcggtgtgtaccatcatgtgtgactccattcagttcgacgaacatgaacggaaattcacctactacggaacgcagctcatcaagcgccgtactcgggacctgaaacgctccatggtcactacaggctacatcgaatcagtcccccgtacccggaacaatccgcacggattgatgattacgaactggaggacactggagaacaaggacctcgattactgaaaaataaccggataataaattcaaaatcattgcatacatgaaatcattcagaaagacacttcaggaaagcaggctcaagacgcatcacttgatacgctcctggctgcaacccaagctgggagccgtcggcaccagataccgcctggcaggacgcatccgtctggccaacatctgggcaaggaaacatcccaaacgcacctttgcctatgtcacaggttcgctgtttttcttgctggcaagtactgtggcaatcgacagcatgaccttgtcagacaagcgtgagccggatgtcagcagcattgcccagttggaacccgtgtttgccggattccgtaccattcaggcaaacaagagcatacatcgttccacgctgacggagttgacccaagagggacaacagctgcgggaggaactggactcgctcattgcgataccgcgtaaaagccatcaggattccatcgatatcgtacaaagttacaaccggctggaatccattgtcaaatcacttcaaaacaatgaccatccatgatcagaaaaatcaatttcaaacagcccaagtacatcttcccgttggtggtgttcattcccctgtgtgccctggtgtacttcgtgatgcagaccttcggaggcagcgaagatgcccagcagacggttgccaccgaccgcatcaatacggaactgccgcaagccaatgcggaggaagccggagataaaatgtatgagatgtcgcgccgatttggggacgaagatgccttcaccgctatcggtgctatcggtgaagaacagaagaaagccgaagaactggagcacggctacagcgaagacgaactcaacaagctggatgcagcggaagcggaacggcttcgtcaacaacgggaaatggaggaactggaaaggtcgttggccgaatccagaagacacatcaactcctttgtctacggggataatgctccttcaggaaataggtcaaacaatggaagcagaaccgcttcatcagcacctaccgatggctatacttcacaagatgacttcgctcgtgacctggaggaaatccaacgcagaagttacgaacggcagaaggccattgaaagcggattgggtatcgggcgctttgaccgggatgaactggctcagaaacaaagagcagactccattgccaaggtccgtcaggctgaaaaagaacgcaaccgccccaaacttgtcattaagtccggtgataccaatgcggagaagtttcatacggtaacttcccccgatgatgtagctgaagccaaactcattcgggcgatgattgaccagaccactaaagccaaggaagggaccagacttcgtttcaaattgctggatgacattaccgtcagcaacaccaagttgaagaaaggcacctacctctatggaacagtgactggctttggacagcagcgtgtgaaggccaccattaccagcattctggtcggtgacaagttcatcaacgtgaagctttcggtgttcgataatgacggcatggaagggttctatgtaccggaaagttctttccgtgagttcgtgaaggatgccagctccagtgccgtgcagcaaaacataaacttccaatcggaagatggctacggttccggcatctcaggtgaagctctggcactgcaagccttgcaaaacgtctataactcagcttcttcggccatttcgtccaacatccgcaagaacaaggcaaaaatcaagtacaacacgattgtgtatctgattaactcggaggaagcaaggtaaaaggtctagaatgaaaataggtaaactatcttactaatcacagagtaagtaaggttacaagtaatagagtaagcaagtttacaagtaacgcaatcagcaaataatcaaatcagtaaatcataaaaattacctaatatgaaagcgaaattatttttacttttcttcggtcttctcggttttgtcgtacaggctgcagctaaggagaagatctacgtgaacagtgaggtaactacccacatcgtcatgcccgaaaacatcaagttggtggacatctctaccaccaagattatgggcaaccagtgtgccgacaacatggtgcgcatcaagccttatctggagccagactccattaaaacctcctttgacgagaatgaattgctgggcaccatcaccctgattggagagcgccatatcgctcagtatgatgtggtttatacccattatcccagcatggcagcctccatctttgaggtagcttacagtgatacccagtcctatatcaaccccgaggtatcgatgcccaaggccgaaatggtgcgctatgcgtgggcggtgtatggcagtaagcgcaagtacaatcaggtggtgtcgaatgcccacggcatgaaggccatcgtcaacaacatctataccatcggtgactacttctttattgattattccttacagaacaagacgaagattgcctacgacattgaggaacttcgcgtgaagctgacggacaagaaagagacgaaagccaccaactcgcagaccattgaactgacaccggtttattcgttgaatccggtcaagaagttcaagaagaattaccgcaatgtgctggtgattgagaagctgaccttcccggatgaaaaggtgctccgtctggagatctcagagaaccaaatcagtggccgtgtcattacgctcaccattgaatacgaagacatcctcaatgccgatggctttgattcggacattctgaagaactcttcatgctatccttactattacatttaccgctaaatctgacccgatatgaagaagattttaatgatcatctgttgtgcgtttgccgtgttttcggcatccgcacaggacaagaaactcacgctgaatgcaggtttcctgttcccgaacaccttgaatgcgatgattggttacgagtatccgttgagctatggcaatgccgtggaaatctacggtgaagtggggaaccattggcagaaacccacctgttgccggttctggaagggctactattgggatggcggattggtctataagcagcgactggtacgttacaagaacggcatgctccgcttccgtctcggccctcagttcggtgccacccagaagaagttcttcctcggtgtggaaaccggttttgaatacagctatgtctttcagaacggctgggagttttcgctgatccagaagaacaacgtcaacttcctgcatggagatactttccgcaacggactcttactgggtgtaaagattccgttctgattatcgtttaacgtgtattttaaatgcaataacaatggcattcgaagaaacccgggaacagcaacagatgtacaactacttccgcagttgcatctacatctttctcatcatcgagattgtgatgaatcttcccatcacggcggataaccgtgtcacgcagtttatcctggacctactggcccgcttcaaggtgttcaactccgtgtcaggctgcaaggtggcagagctaatctgcatctgtgtggtctgtatcggaaccaaggcaaagaaggcactgaagttcaacgtgaagacgatggtcatctatccggtgctggctggattgacattggtcggtatgtgctttatctttcacggcatgaatgtcggcatgagctggttcggctttccggccaaccgcatcctctatgcactctgctcggtcgtaggtaccatgctggtgcatcagggactggacggcatcgccaagtattacaactacaaggtgggtgaagaccgcttcaacttcgagaatgaatcgttccagcagtcggaagatttggtagccaatgactattcggtgaacatcccgatgatatactactggaagcagaagatgcacaagggctggatcaacatcatcaatcccttccgtgggacgattgtactgggtacgccgggttcgggtaagtccttcggcatcatcgatcccttcattcgtcagcacgctgccaagggatttgctatcatgtgctacgattttaagttccctacattggccaagacacttttatatcagtattgcaagaaccgcaaggctggtaaactgccacaaaactgtggctttcgcattatcaactttacggatgtagagtattccgaccgcatcaatccgattcagcgcaagtacattcctgacctggcggcagcatcggaaaccgctgctactttgctggcttccctgaacaagggaggcggtgaaaagaaaggcggttcggaagccttctttaccaactcggcagagaactttctggcagccatcatctatttctttgtgaacttccatccagtaggcttcaagaatggcaagaagctgaaacgctatgtatctttggcaccagactccgaagtggtcatacctgagggaaataaactggaactggtgatacggaactgggacgattaccatgccctcgatgcaaagggcaatatcatcctggattttgtagataaagacggaaacgacgtgtcaacggatgaagaccggatgtttgtggatttaaacggcttctcctacaaagatagaactggtaagcaggtgaagattgaacgctgctggtacgaagatgataaaggcaaggaagtagagccggacaccatcaccggggagtattcggacatgccgcatgtgctgtccttcttaggcaggtcctacgaccaggtgttcaatatcctgatgcaggacgacaagattgcttccctcatggctcccttcaagagtgcctacgagaacaaggcgaacgaccagttggaaggtatggtgggtactcttcgtgtcaatgccgcccgattggtatctccggaagcctactgggtgtttacgggagatgacttcgacttgaagatttcggacaaagcccatccgagctacctggtgattgccaacgacccggagaaggaacaggtcatcggttcattgaatgcactggtgctgaaccgactgattacccgagtcaactccaagggaaacatcccggtgagcatcatcgtggatgagctgcctacactctacttccataagatagaccgcttgattggtacggcccgctccaacaaggtggcggtgaccctgggctttcaggaactgccgcagctggaagcggactacggcaaggtgggcatgcagaaaattatcacgacctgcggtaacatcttcatgggtgctgcccgcaacaaggaaacactggaatgggcgcagaatgatgtgttcggcaaggcgaagcagacttcccggtccatctccatcaacgacaacaaggtatcgaccaccatctccgagaagatggactacctggtgcctgccgccaagatagcggatatggcgaccggttggctggcgggtcaggctgcccgtgacttcacggctacggacgacagcatgctgaaccacttcgacatcgagcagtcggaggagttcaagaccacgaagtacttctgcaagacacacttcgatatgaagaagattaaggacgaagaggaccactatgtaccgctgccgaaaatctatgagttcaagaacgaccgcgagaaggaaatcatgctgaaccgcaacttcaaacgggtgaacgatgaagtggagaaaatggtcaaggaactgctgggtatggcgtaaatgatttgtatatggcatccttacaatctgcatctgaacattcaatcttattaccttcattgagtggtagtgcactgaaggtcatcgcccttgtttcaatggtgacagaccactgtgcctactacttaatggaacacggcacacttctttatgaggtcatgcgctgcttcggtcgcattgcctttccggtgttcgccttcctcatagcagaaggcttccggcatacccgaaaccggatgaagtacttcctgcagctgcttggatttgcagttatcagtgaagtgccctggtacctactgaatggcgcggacgggacgcacaatgtactcttcaccctggcattgggtgttttggctttggctgcgatggaagcattaaaaaaggatggcatcctttgtggggctgtcatcctttctatagctggtttcgccacttggtccggtgtggactatgagtggcgagggattctgatgatggtggtgttctacctgttcgggaacgtcagcaatccttcttttccctctggtagaaaggcgcaactattctgtacctttccgctgatgatgcactatgggatagtcggcgctttgctggcttgcggggtgattgcttgttatgctggaacacgcgggttcatccatggcaaggtggcgaagtatgggttttatgctttctatccggtgcatctgattcttttggttctgataggaaagtaatctatcttaatgtgggtaaggttgagtccttattcaggttttattcttttcccctccttgttgatgtagtaccattccttgctttcctggtagtgctattatctaattcctttcttccataaaggctgtgacaactccctttcgaaaactattatagcataaaaacagcccactctgttgtttttttgttcctttgtgtaaatttgcgattgcacagcatcctgttcgaagggtatgtaccttaaagaaagagtgagaatcaaagaataaaaacaaatctaaaaacaacaaaagtatgaaacgaatgaactgttattttctgctgttggtagccgcactatgtgttttgctgtttcatgcacagaaagagtagccgatagatggtattacaggcataaacctggaagacggccgtattctccaccgggaaatttcggacgacaagcctcttacggagagcaccgcattatcgacggctaccattcctcctatatccttgcccgtttcaagggcggtcttttcaatggcgattatgaagagtacatctacaacaagttgaaagccaaaagctcctataaggagggtggaaggacagaacctgcagaaagtatgacgttgaaggtagggtaacgaaagagaaatcctagaaatccggcaaactggacggtgctcaccgcacgttttacacaaaggagaaactggaaaaggaacgcttctacaaagaaggaatgaaaaatggaaaggacgtgtactacgagtttgacggtacgctgcgcagggaacataacaccaatagctgtttaatgaaaaacgatattccatttctatgtacttcttctgcacaagttggattaaagaccgacagatgttatgtatatagaacttccaaaatttgatcagccacttttgaatcactaatgcgtatggcattgttttcatccgtattgtaaccaagatagttgacgcttccataccatatcaaagacttgtcaatgataacagcgtccatcgacaatgaatcaatgactttggtccggattcctgtttctttcagtctttcttccttttctgtattgtttttgaccaaagcgaaaacctccacacctcgtgccgacaattccttcagcatgtcaagtatgggggaatgtttgctcagccatagcctcgttgcagaaatgacgaccgaatgtttggcttgggataaatcattgaaaaacagcttttgataggtgtgtccgttaaaaataatgccttgtaggctttcagcagatacatccaccggtttctcctgcttgatcctataacctacagatgcatatcctttcagcctgcgtctgtacatcacatcgcacatcggcatgcggatgtcaatatagtcatagatgcggacttccttcttacctgtatattcccggtgcaatcgcccggcatattgagcgacaatccctttccaggaaacgggcaaagccagaaacagggtgtctaaacggggatagtcgaatccttcgccaacatactttccggttgccacgatgacaagtggctctgaggggtttacattctgcagatattccattctacggagtttttcctttgccggttccgaaccgacaagggtaactacatgtttgcaatgaggagccaaagcttttgccaatgtctctacatgagcggtaagaccggtcagtactataggtgttcgtccctccttcaaggcttcgcatacatcatccgtgatgagcctgtttctgttcacgtcttcggacattttctgcaccatccgtgcataagtggatttttcatctgccagttccctgtaggaggtgaaacggggtacgagcaggcgtgcgaaagtttgggatgccatctggactttggcatcagccgaaaaacggaccggcccgcattgcatgaagataatgggctggtggccgtccttacggatggaggtggccgtcaacccatagacgtagcgggcattggcatacttcaatacccgttcaaaattcacagccgaaacatggtggcattcatccacaatcaccattccgtagtttcggacaaagggcttcaccccgttctcctccagacaggactgtatcagggcgatgtctatttttccatgcaacgtgtttccctttgaatccagagtaccgaatggagaaaaggtctttttacggccacgctttttgggtagttcatcttctgtaaagtcgatttgaagaaattcttctaagcgggatttccattggtccagcagagccttggtgtgtactaataccagcgtgttcactttccgctttgctatcaaaccgatggcagtaactgtctttccaaatgcggttgtggcattcaacaccccgttgttgtaggctgtcagacaagctatggctgcttcctgttctttgtggagtttgcctttaaaccttacggttatatgctctccggaattggtcttgtcttccacgcggtaagatacccggttgctgtccaacagggctgacacctcatcttcacatcctcgtggcagggcgacataatcctcttccatatcggcacaggagatgatacgggggatattgtaagtggacaggcgcattccttgtcttggcatagaactcgggatttctgaacgatgcaatccgtttcagatggttgataacctttgcctggagtccggacaaaggaatatacagcatgttggagcacacaaggtggagattggccggaaagtcatttcgggtgattttctggggtgtcggagtttcccaaggccttgtttcgcaggttgtggacaaatcgccgagttcggaagccgttgcatgctttgccagtatcgcatcaatttccgcttctgaaagccgtttcatttggagcagatagtcccactggtctttgtaaaccataaagttttcatccacaaatacactgttcccttccttgcgggctctcccctgcaatggcagtgccaccagattcccgaatccgccttccggtagcttgtcctggtttggaaagaatcggtcgtaggatttgaaggtcatccgcccgtttctgttcgtggcttccgtcaggatcgtgtttccaagcctccgtgctttggatgcagacaacagctgttcaaagaatatccagacatgtgcaccgttgccggaacgggagcgctctattgcacagggaacattccagtccttgcagaccccgacgtatgccagtacatcttgatgatagccgtgttcacaggatttgtcatcaaaatccgcacaaagaaaattacaagtatggtctgcaagaatggcataggcaccgattacatcctgtccgtccggacttttcccctcaagatgcttgtatatatcctcatactccaatgctttgaacagcctattggggcattccgtacatctgtatcttttcttgtcgcacaactgcctgtcccattcgttccggcatacaggctggtagccggatttcccggtggtccggctgtaccatctacgcgcaaacacgtcctcgcgtcccttgaacagattgcggaacacatccactttttcttccagagacagataacttttcacgataggcggtgccgtcacgctgttcctgtcgctcagcaaagccttcaacttgtccatttcctcatgaagaagcctattctctgcaagaagtctgttgtattcatccaacagttcctcatatgtaagccgtttttccatatcgtccaaaattgtggcaacatatataaaggtatgcatacggtctttcccttgagcagtcaatcacatatctttcaattcaaaattcacatattcacgttattatgtttgcgaatatacatcttttatctttaaaagagcaaaaaacgggcatccaaccgctgttggacacccgccactcatttaatcaactacttatgaaactgaattactcggcttcgccagtagaagaccagctatcgctgctccagcctttgtcttgcgaccaggcactttcggtttgttcaccggcattgatggtgaaatccagagttttatctccgctaccggtaaggatagcatcttcggtttggagcttgataacttcgattgaaggttgaatatatttcttcattgttgtttcgttttgttgtggttaaatgttgaaggagtgttgattactgagcgatgaacttcttgccgttctggatgtacaagccacccttcacagccttcatcacgcggcgaccggtcaagtcgtagataggagcattagcatcagcagcttcgcccattacgttttcaatacccgttacatcaccgtcgaacacgagtttcatggcctgagtagtagcagcttccaagtatgccttattggcaccaatcttcttgccggcagccatgctgtagaaacctacagcaccttctgctgatttaccgaataccaattcgttcgtgtaatctttttcaacaagtgtaccagtaagtgcattgccttcagcatttgaagttgcagtaccgagcgtcaaaacagccttaccttcgttggcagcacccttcagtataacacccgtgttagcaggaataccggcttcaatagccgtagcgcgcaaagtgctttcgccttgtttctgaccgatgtaagcggtagcaccctgtactgacgaaacagcgaaggggagatatacggtagcgtatgaagcattatcggcagtgttgagggtaacttccacatcggtagcttcaacaatgtaccactgagaagcatcagcagattctccccatcccaccaaattatgactttgagaagaagcgtcgtgaatgtagcaaaagttcttttcggtacttgtaacgtccttgagtgcatacagggcattacccttatcaataacttggaacgaccccatattatttttatcagtagtcaatcgtatttgattactcttagtcacatgacccaaaccttgaccttgcattttcaagtgatactggttctcagtttcggtagcttcgaacaatacaaccgaactgattgccttttgcatattttccttaccggtcatatcagcattggcataacgagactggtagtatttattctgcaagcgataatacttacctgccttgagggtcacaccgttcggctttagtgctttgattgcatctactaatttgttggcattcccaaaattgaataagtctttttcagcttcagtaatagccggatctaattgctcaactccggtgtaagcacctattgcattttcaggcatattggcatataattcggcctgttccatggcaatggccgctggcttaaagaagcgacaagatgaaccttcgtccgcatctgaccagtatcccagcgtattatcaccttgatggtttaaaaattgagtattatctgccttgaagcaggctgcatttgaaatggaagactgaggctttacaatatgccaaatagtatgtttttcgccttcggtaatctgaggtttatctgtggtggtattaagtgatttattagttccggctttcttattgtagatttgaaaaccatcaaatacgttaccggtgagacaccaaaagtaagcatcatcctttgatatgctgactaaatccccaggaacggctactgatatattttgattatccgcctcatagtgacacatgtaacgattctgattactgtgcatatcaattgcaaaccatttcggatttttcaagtctgtagttttttcaaaaggcaggttttcggtacaattaaccgttacattttcaccgcctgttactgtgcctaccggttgagtaaaggttatgaaatcaagaaccggagcattgtagttactgccaacagcttgtgcaacttcttttacaatagtggttgaagttccttccaattggtaagtataggtaactttaacagctttgatgagatctgcttcttccactttgtagaactcaaacatcataactgatgccgggtttgcatctgtccatgaacctaatgcattagaagaatagtgaacacaagccgtcttattatcgttctgaatgatgcacgaaccatcagcagcttttgccgtcttattaccaagtgtaacggattcagtagtcttggtcaaattggctttgttcgcataaactacgaggttcttttggccttggtaaggagcctgccaggcagcttttttattggctgtagaaatagtgaaagtttggttatcttgtcccatttcaacataccacaattccaaagcattgctgccatcgtaggcggtgtttttaccttgtggtgtaattactgcattagctgcttcgctggcagacttcaagtaaccaccaggtttacccgaagcattggggttcacctctttaatcaaataataaccagtagtcaactctgcaggtaaggtcctgttttcggcagctttggtgaagccggaaatttctaactcctgcgcattcattactcccatcatgcagaaaaggaataacaacaaataagtaaatttattcatagagattaaaaattaaaaaccataattttgattcagttctaaagcgaaagcaacatcggtttgtgccagtacttttctcataaactggaaatcagcatcagcaaagatgtaaacttatttgtatggatggattgtgatttagaaactgttttctgcgtacatgcgaagttagcaagtatcttatcatgaaatctagtgaatactttaaatatggaaaatattacaaatatttaagtggtacccccccattttgtaagatgcggtttgcagttattgacatagttggatatgaatttatggtacacgtttgtaaataggtacttttcttcctactataggaccataaagctggaaatgtgtgtaaacggactgatttcggatattatcttacaaattccaagatgaataatgttgagtatggagactttccgatgcttaaagtattctatttcagttctcaagataatccgaaattaacggacaacggttactgcatccgccctgtacatccataagcattcataatagataaaggttatatattgacccgaacagtgcgattacactgttcaggtctgtttgcttctatactattcaaaacacattcctcaggtagcaaatcctatttttacattgaaaaagaaaagaataagcctctggctcttggcttttaatagtaaatgtttacctttgtataaaacttatagccgtaagtattataacggtaagttttttttctgcaagtacaagtaaaagaaaaatatattagaagcgtatgaaattttacaatcgcgaaaaggaactggccttactggagaagactcgtcagatagccttcgcccagcattcacagatgaccgtactgaccggtcgtcgccgtatcggaaagacgaagcttatcctgaaaagctgtgaagagagtccgacggtctatctttttgtgagccggagcaatgaatccatgctttgccgtggatttgcgcaacacatcaattcagtactatccaatgtcttcattcctgaatccatcgattccttttcagatgtattcgagatgctgatgcgagccggaaaaacggaaaagtacaatctgatcattgatgaatttcaggaattcttctatatcaatccggctgtttacagcaaaatgcaggatatctgggaccgatacaaagacagcacgttcgtcaactttgtggccagcggttcggtctatacgctgatgaaccagatttttatggatgcccgcgaaccgctttacggacggtgtgacagcatcatcaagctgcgtccgttctctacttccgtactgaaggagattcttcatgaccacaagcctgactatacgaatgaagatcttctggcgctttacactttcaccggaggagtgcccaaatacatcgatctcttcatgcagaagggttgcacggatatggaaagcatggtggattacatcgtgcaatcagattccccgttcctgaatgagggcaaggcattgctcattcaggagttcggaaagaagtacggtaattattttgccatactgtcggacatcgccaacggtcggaatacgaccgcagaaatcgagcagaacatgggagatacggtcattgccggtcatctcaaaaaactcgaagaagattacgagctcattgtcaagaaacgtcccatcctggccaaggaaggctcgcagacggtccggtttgaaatctccgacctgttcctgcgcttttggttccgctatttcatcaagtatcaccggcttgtcgagatggagaacttcgagcaactggggcagcttatcaagaatgactatccaacctattccgggattacattggagcagtattttcgtcagaagatgatggaaagccaaaattttgtggatataggttcttggtggcaggctaaaaaaggaaaagatgcttgcgaaattgatattgtcggcatctacgccgaaggccggaaagcattagtagcagaggttaaacgacagcggaagaacttcaagccggaggattttgctaccaaggtagaaaccttacgaaacaaggtccttcataagtatgatattttaatggaatgttttacgatggaagaaatgtagttaggcgaatatccaaacggacagaaaaaaattacccctgtcacagtgtgaagcaggggtatttttacaagagcgagttagttagtccgtccgattaaatgttatttcactaatttctttcgtccgttgacgatatagacacctccaagtactggcttcttcaccagacgaccctgcaaatcatagatgcgggtcggctgagcagcaggagccggagtaagcactgagtccaaatctgtactcatgcccaccttgcagatttgccacatcgaagcatcagcacttgatgtccagggcactatatgtccgtgagctgccagatgaatggccggaatgccgccattacccggcttcgtacaactcagtacgctaaagcctgttgccgaagaagttacctcgtatgttgcagcatcagccttggtcgtagcaggtacacgttcttccgtttgtcccgttacacccagccacttgttgtacttttcattgtacactttccagttacctgcttcatcttgagtaaagacaaactccatatagtcgtcccggccttccttgccgacatactccgtcagattctcgttcaaggccagttttttagaggggtacaacttattttgaagcatgtagactgccccgttctctaatgcaatgcgatgacttgaggctacttgctgaatctgttcatacgtttcaggtgaagggtcggtcacacactgagcaccggtttctttgagcagcgaaagttgctgacggtcatacatacctacaaagtcgcccgtttgctgttcgctgatgatttccaccttgcgttcgccacaagccttaatccaatcggcatacccttcttccgcacgtacactgtaaagactatcggtaaggtgttccaaactatagtttttataaacaatggtatagccaccaccattagtgcgatgtgtatcttcttcatacacgaaaccaattgtagaatcagcttgaagcgtcatcgttgagtaagcagaactcatacgcgaagcctggtgacgaccttcccagttggcagccaaagagtctgcagagcagaaatcttcgtatgaagcgagttccttataatagacacctacattggcacggccgctgccgaagggaagcgactgcaaagcgagataaaggggtttgttgtccgcacggcgcgtaacaggaagaatcataatttcaccattgcaggaatttccctctgccgtcactccgttattgttcttgccggagaaagccaccgtaccccagctaccttctgccttcttcgcactggtaaagctgtatatattataataacggccgccattgcaacggctgctgataactacactgccgtcgggcaattcttcagccttaggttcatctgcccccgaaggaataggagcgatatcagtgccacctaacaccttccagtttgcaccgaagtcgtcggagtaaagcacataattacacattgtggcattgacatcacgcaccaaagcggcacagtagagacggtaatggcttcctacctttgtatagcggctttggtgaatcttacccgaacctataaacatggaacgaatcggaccgcgcttagaattgtcaaactgtgaatagatgctttctgccaggttggtaggtgctgaccacgtcttgccgaagtcggtgctgataaagcgagcaataccctggtgatgttcgcgtgtaccgctcgggaaagaaatgtcaccggaacagctcagcacgagcacgtcattggtttcacgatcagcaacgatacaggggtcaccgaatcctgtgtagaaaggatcggttgcattcttgccctgtccctcaacgatggtcgtgatatcatcccatgttttaccgttgtcgtggcttacacgggcatgaaggtcaatgcgcccattggcactgccggcaaagccgatgtcgctgcgtgaatgacgatagtccgctacggcaatcacatcaccgttttttgcagtagcgataccgggaatacggtagggaattgcagtgctgttgagcgtagggaatacttcaaactgctcttccactatatattcgcctttagcaacagtcacatggaaatttgtcagtttcaagcccttgttgacccctttgagggtaaacgtagccgtctgctctttgagtccgctaactgcaaagtgttgcaccttattgctggttgtcagcttcgttgttccgcaagctacttcaatggcatcattgtgttcgttattaatgacatcgaaagaaaatcctgttactgcatagcccaccgggacaatcagcgcatagttttcgggagaatacagacctacgtaagcaaggatattaccttggtcatcctttgtcatattattatggcttgcatcaagttgtaacacaggattggtaacgtcgctctgccatatttggtgccaggtaccattctggttactcttgacaaacttaccgtgagccatgtctatctggtaagtcccttctggcatatcttctttgccataagtcaaagatgctacttcatctgctgtgagtacacggtcccatatgcgaacagaatgaatagttcctgcaaatggatattcattgattttatcctgacggactacaccgcccagatacaatccgtcaacattcggcacattgccaaatgtacggtatccatattctcccattcccgaaacactacgatcggcttttccattaaaatagtaatggtaggtttccgtttcaccattcattgtgatgacaatctgactacgcttcgtcaggtcttttccgccccacgtataccagccttccttgtggctgttgccgacatattgtaaaccgtatttgtttgtttcgcgcgtcactacgccaaagtaatcctgccctttactgtttgacgaagcaaagagcatagcaggttgagcgggagctacttttggagtgaagtcgatggctacggttacagacttgtgcttgaaaatttcagatgccacatcagcgggaactgcataaggcattgtgccgtcgagcactaccgaatcgagtactgctacaggattcgcatgaggttcgggaatcactgcaggcgcattgacaatcgcaaattgacaaccggcatcctcacggtccaatccatcctgccccgaactccaattatagagtgcataattcagattcttttgcgtctggttaagttgcactttaccgctgcggatgatgaagagtcccgcggtgttgctgtaacttaattcccaaccttgtgcaggagccgtagctgatgtagaaacggcagcattaaagttggctgtagggcttacataaccgctgtcttcgcggttgatgatgtcaaacgtaccatctgtgcggctgacaaatttccacatcatgcgggcataagcctgtttatcgttacctgtcagctctttgcctgttccgttcgaggtaaggtagcgattctcgcggttgggtgtgtaaagttggtaccacgtttcgttatcagccgtcgaagcttttggcaagttgagttttggcaacagggtggtcatcaacgcattgagttctttgctcatggcagccagttcagcaccggttgcatcctgtttacttaataacatataggcagagggaagagccttcaacaggtctgcagcagcctcgggcgtgtaagcaccgacctcgttacccagttttaagccttctgcacgagaaatgatatcacccagttctgtgcgttggttaaaaaccgcataatttaaattggcttcttcgtcacttgtgggaattatgcccgctcccatggtctttgccaataattgagagagtttggcataacctttaccatagaggtagttacctgagaagtaagcgggattagccattccttcctttacaaagggtgtatagcagtcaatgtattccacgttggccagttcctttaccagtgcctgaagctttgtattgaaaggcacgatgcggttggtgttggaggctgcatcacttttgggcagaatagcctgcacatagatgggagcgttaggggcttgcttgcggatttcgcctaccaaagttcggtattctgctactacggcatcaacggttttgttggtgttattcaagtcagccgtaccgatatagagataaatctgagcgggttcctcattatcggaacgtcccttgaagataccactaatcattttctgaatcgtagcaatgtccggtccgggatagccccaacccgtaccacgactcttcactttgtcggaatgtagcagttcgtgccattctccaccgtgaatagtagcatcacctatcagcaggatgtcgtccttacaaacaggaagcatactgaaataggtggcacgcataccgtaggaaccgcccagattgcaagcattgtctggtgccgaagcaggataaacgcactcggaacccacataccgggcaattttgttacaccaaatgcgatatcctgatgccgtcagatgaagaccgtccaatgtatggctgttattgttggattcagatacgctgagcaggtcattccataggtcaatgtaagtaaccttcatctccgtacagattttcttcaaactgtcattggtttctttttggagggccagattacgttgacggctgggtagaatactctgcacaaacagttgagtttcgggcgtttccaactggcagcgctttaatgtcgtgcgcacattgcgtgccacttgtgcagccgtgttgagtcctgcggtgcccaggtcattggtaccgatcataaagaagatttgtttcggtctgcctgctaccacactttccaagttggccagcatttcattgcttacggctccggaaacgcctcggttaataattttcaggttgccaaaggcttcccaccattcatgcatgttcgtaatactgttaccaacgaacactgtatgttcaggggtaatcttcagcactttaaatgcgtcgtaacgatgattacgaaacggcagatcggcaaatgccgatagtgctcccagacaaaggaaagagagcgtcaacagaatttttcgcattgtgataataaattggatgaaatggaatgtgattgagtaatacccaaaggggtagtattggattaaatcggttaatagttaacagcccaaaacttgtgatttcttttccgcagcatctgtttccgcattgaaaaaaaactgctgcgtttaatgttttttgccgattagcatgtattagatatacaaaatcatcttcgacctaatttgagatgcaattattgctaacatgatcaaagtgagaatagaaatgcaagttttcatgtgcgtacgaactcagaagatagctttcaatgcccatacacggatttatgcaaattcgatagaactgtcatcgcggcagatttgttatgccagcaaacaaaatgcaaagtatgttgcgaaattccgagtgtgtccgatagtgccaaaagcaaattctgacctcatatttagccgttattgtccttttcattgtactgtcggcaaagataccgtaattatctttaataacctgctattgagtagattttttttgtttatctttaacggaaaggtggttttgtcatacaaccaaactactgaatgcgtatcggttaggacataaaaagcgtattagcaatcttgaaaaacacaggcaatacgctgtgagccgataaagatgtgcttgatatgttgttgcaaaggtgtaagcgaagaactacaggtgttaagcctttctatacgataatagtattttccatctggttatctaaaaagttctgacaatcctgcagaacggcgcatcatccgttgatatggagacacaagaaccgacaacttttaaacaacaacgaaagtgcggcagatttagccgtaatatgcatcttatcggattatgtaaactggcaaggttaaatccgaaagaatagttaaacgataaatccctcaatattgccatgcaactagacaattgacaaaagtaaatcgggctgaccttgccaagaaagccagcccggcatatagcataaaaaagctaagtcacctaaaaaaattacctttatttcaacagcaccttctgaccattcagaatataaaaaccgcgcgtggggtgataaacccggcgacctgacaagtcatagtaaacaggagaaggtaaatcgttgggatttatcgtagggtatgaaccgacagaggttgagcctccttcactgaatacatgggtaatctggtatttgcatcccgtgtcggaagtattcgttccgccaccccaattgaaaatgtgatagccttgtccgctattgttcgtttgattaaattgtaccgttcctgaggtaatgatgaaatagcctaattcattggaaggctttaaagtccatccttttgcaggagtattggcaactgtacggagtgcctgattattagggctgtcgggcgaaatatacaatccgtttgaggcattttcgatgttgtaactaccatctttgcgcaaacgaaacagccatgtggcagtttgtttgtcaaaggattcttcaccgacaagaggctgattatctccctttgcagtggggtaacgattaccgcgcagtggggtacagaaagaatagccatgacgttctgcctgctcactgattttcggcatattcaatgaggtggattcttcttctttttttagtttgtcaaacacagcatccaattcattgcgttgggcttcacgttccgttgctgtcaagctgtcttgtagagtggtgcgcacctgttctaactgcttacgaagcggaagagcaagggattcgggataaaaccctaggttattactataatgagtatcaagataataactaatttcatcaatacgtgaagcaagttggtcggccgcatcgtcaatacatttgtttggcgaataaacaatgccatcgagtgcttgtttaccggtcgggtcggtcagcacaaaggtaaactgccatttgtcacggccggttccaccgttgttgacatgcggcaaacgaaggaacactttgttccagcccttgcgaagatggaccttaaccacctcgcgtgccgtaagattttcattggtcagtccttgagtcgcatgattttgctgaatgtttgcatcgggctgttcccagacgggtgctgcaatctcagctccgttgagccaaattttcgaacctcgacgatcccaagcaccggttttagggcctttttcgttgcccgaacggctataggtgtaaaattcgatttgtgcaccggcatcctgttctatgggtgaataaacgtaggtccaagcataagcagtttgattattggccggtgaagtaaagaaagaaggcactgtaggatgccaaatatggcgcaaataaatacctgcacccgttgcaatacgtgtggcataggttttcccttgatattcaaagccggagggaagtatatcggcattgctcgtttcggggggaagggcaaaagcatgatttccaccattggggaatgggtccgtaatgcgccagcgcacattggtttgcttcacataagctataggctcatttttcagcgaatgtgctttatgaaaaaggaaacgtcgttcgaagtcaacaaactcatcgtattcagcaccttcattgggcagtgtagttccgcctttttctatatactgttcaccaccgccataccaagcacgctctgtagaggcaagaatgtttgcataaatgttattctggcagacgatgtcggcatccgtacgtgtctttgtatcgttccacgcagcagatattgttcctgcaacttcgggagtgccctgacgttcgtaataaatattgctcttgtaaatgcccaccaagtcagcatacacatcaaagtggttggtgtagttatagcggcaatcaatattgggaagcccttttacgactttacccgacgtggcccacatttgtgtcaaatcacagacagatgcagtcggaggtcctgcaaccaaacgattccaaagaatcactttcaggcctttatcgcgcacatactttgacatcgtttccagaaactgaggatatgtaatgtttacttcatcgcctcctatatgaatataaggaacactctgaaaaacgtcggcagcttcgtccaatatctttttgagtgcagccactccttgctcagtttgcatatcataccccattgctttctggaacacatgactatgccccggcatatcaatctccggaatcaccgtcacgcctcgctctgccgcatatgctacaagttcacgacactgttcctgtgtgtagtagcaccccggctggcgtatattgttctcggcagcggtcaattggggataagctttaacctcgaaacgccatccggtgtaatctgtcagatgccaatgaaatacatttaccttaaaacgggctaaaagatccacttgcttcttgatttcatcataggctataaatgaccggccgacatcgtgcataaaaccgcgcactttaaaggcaggccagtctgtcagcgtcaaagcttcgaatgcctctgttccttctgcataaccttctgccaattgttgaagggtttgagcagcacgaattacccccgttggagtgatggcttcaatcaatacttcatcggcagaaatttgcaaacggtaagcctcgtcaggaaacaggttcacttcatgattaaatgcacccggaatttccttcacaatatttaccgttaccttggctttcgcctcagacacgatggtacacccatttgcttcaagtacacgttgcaaatacttacatgccgttgaatcctgcagaactacctgacggtggagtgcaaaaggcatccctttcaatcgtgtcagttgatgtactttgggcaataaatcgcctaccctcgcagatccgggctgactaataaacaatccagccagcagaagcggaatgaatagagcttttttcatagctttgtagataatttaatatgatgttaaaaaacaactgtccaaaacaggcatagatatagtacaggccgattgattcataaaggtggtgtttataattcctaacgaacagcctgtttttggaatgtgcttcacagagtgtgtttgaagtaagtttgattttaagagtgatgatgcaaaattaatagagaattttgaaattcaaattagaaatggctttttgtgatgtagccggatgtgaaaacgggtttagtcgaggagcatgcgtttacctaatccaagttcacggcatcgtaggtataggtgttgtcaataaaggcttactgggtggccaatagaacgatttgaagatgtgtcaatgaaccttctttttatgacacaaccccgactgcttccatcttgaacaatggctacgctacaaacccaatcctttccatcacgttaaattacactatatcaccgactaagattattacatctgcccgacgagataccacatggaaagtatcggcaccgtacggtctaagacagaaagcggatatgtggccgaaaacgcacgctaccgcgcgcagaactgctaagacgcataaaagaagaggtgtgcagttcaatttcatacacacctcctccaaaaattaaattttttcaattagcagctctaacgaatcatcctcaagagaattgaatttatcaaaatgaatgtgtgtccctgtaggaacggaattttgagctaaatttagaaaatggtttgctaaggaaattaggccttctgtattagcttcaattgaaatagtcccattctcattagaaactttaatttggaaatcattttcccaatttaataccattcccatatctggagaatagtctggaatatttaatgatactttcatttttattcagttataaaaatatgataattttgttcaaccatcatctttcccggtttgtttggatttggcttaagaatttctaaatttacatgaggccctcctccatgttttcctaaaatgtcattatcacccatacgaaaaacacgttttccatcggcagaaacatatcttccaggactaacctctcgataacctttcccaaggaaattttgtcctaattccagagctttgctagatgtggtcttcattccattcttaattcctaactctgaaacagttttaaatccttctttagacccttgcgttaacgctttagccgtaatttttgtttctgttttaactgtttgctttaattcttgctttactgtagtctttataccggcttttataccggtttttattccacctgttataacagaaccagaaccaaatgttgctacatctgcaataagtccaagcaaaccaattccacaagtaaaaatatcaccgtcacgaaatcctctacaaatgtcgcgcccgctacctataaccggaataaaatctactgcgtcaacctgtttcccattaggatcaaccaattttataggattttgatagcagtaaatatacgagtttaaattggcataattataaataccaccattatgctctccatcaagatagttttcactatttaatgggtcataattggaaataggatctacagaaatccacaaactcagccttggatcatagtaccttgcaccatagtaatacaatcccgtctcttcgtcgaattccttcgcgttgaagagataaggcgtattccagatgctgttccgctcttcaatgaacacttcgccgaacggcacatactcgatgtgctgaaccacttcgccgtccaggttggtgatgtagctgctgctgcccaaatggtcgggatggtagtagaactgcaacttctcgtatgcgtccggatcctggaagttgttttccagtgccaaagcacgggcctgcgcagcctcgggagaaccgtcgtcgcagcagaatccctgtccgtccacatagtcgttgttgtccgttccgttgtacggcacctcaaagatagcataattatccttaattacctgctgttgggcggaatatttttgtttgtaattaacagaaagtccgtccgtctcactgccggcatattggatgcgtctcgggtcggaaccgtaggaggcgaagtcgccaatcttggaaacgatgcgctgcgagccgatatagatgtgcttggtgtagcgtccgccctggttggccaccagataaggactgacatagagcgagaacttcgccgtgttggtgcgtccgcccgcgaactcggagttcacgtagagctgttcaccctcaccggaggtcttcaccgtgcgttcaccgtcggcatcataccagtagttggtcacgaagccgttgtcatcggaagccgtcaggcggttctcctcgtcccagcggagcttgcgctcggctgcggtggaatccaatgtgccatcctgcttgatgcggcctgtattgacatagaccaggttgccgttggcatcgtaagtgtaggtatggttgttgtccaccttggccacggaatccggattctcttccgtgcggtagttcgcatccttcacttcggccagctggaacttcttgccctcagtcttgccataggtataggccaggtcatagcccacatggagcgtaccgtcaaactgcacgccctgctgcgtgagatgctgcttcttcgacacgatgcgatgcatgttgtcgtagctcatttccagccggtaggaagcggtcttgctgtccgctccgacataggttcccgtagcacttgccagacggtagagtgcgtcatacgtataggcatgcgccatctgtccgcccgcctttccgctttcgggaagtgcggccttgttggcaacgctgagcacgttgcttacggcatcgtaggtataaccattgtccatgatggacttgccgcctgcgttgaccgtcaggttctgcagcctgcggcgtgcgggctcgtaggtgtagaaggtctccgcaccgttgcagtatttcaggtaggtgcgctgctcgaacttgtcatagccgatgcggttcacgtagtcatagccgtaggacttgtagccgcgtaccttttccagctgaccgccgaggttgtaggagtaagtgaccttttcctcgtccgggtagatcatctccagaaggcggttgtggctgtcgtaggtccactgtgtcacataggtggcaatcgcctggttgggcacaatcagcgtgcggcgggtcttggtgacttcgcccatcttgccgtagaagtactcgatggctcccgttccgtcctcacggagcatcaggcgaccgatgcggttctgcgaggcgttgcgtccgccgtagtaatacttcacgttgttctccgggtggtcgggatagttgatgcccgtcagccggtgataatcgtagtcgtaggtgatggacttgccttccttggcaaggttggctgtctgcttggtcagcacattgccgagtgcatcatacgtgaaggtggtgatgccgcttgcaggatggttcacctcggtgcggcggtcacccatgtcatatacggaggtcgtcacgttgccttcggtgtcggttactctgaccagacggtcgatgccgtcatattcgaaggtggtggtgatttctccgtcaggaccgctgagctgcctggtcatgacagtcttgccgctgccgttggtataggtagcctgcttgttgcccaaagcatcggttacggtagttaccaatgcccggctgcctgcatctgtggtataggctgtcagcgtcttggattcgtcgggaagagtcacttccgtggcacggtcgagtacgtcatacaccgttacggtcggcgatactccgtcaaatgccttgttgaagtccgtccgcttgcccagctcttccgtgacgggatagtaagccttggcaacacgtccgaatgcgtcatagacattgcgtccgctgacaatcattacgttctgtgcatcggataccgagccttcggatgccgaagtgaccacgccgtccttcttgacctgcacgggccgaccgaagccgtccacgaaggtgacggtttccatgtcatcgtccggatgctggatgtcgtagtgctttgtcacggcgtatgccggggcggtgatgccatttgccgtaaattcagccttcgggctgtattcgaatgcgataatataaggtacacccgtagccagctcattcgggccacgtactccggtgatgcgtccgagatcgtccacatcggtctcgtagtagaagttgttcaggtcgcggcgttccttggcgatgccgtagcggtaatcgaaattgcctgcctcgctgcggtagccgaacgcatcttccacacgttccacatacatgttcatttccggctcgtagcggtacttgtaccacatgcgctgtcccttggcattggccggaagtgtcttctgcaggatgttgccaaagctgtcataacggtagtcggtgacggcttcgccgtttccgagctgctgcgttatcctggtcaggtggttggggtacttcgtgtcatataccgccgatacctggtggtaaacctttccgtcccctccggtcacggtcacatcggtcggcagtccgaggatgttcctgctgctgttggaggtatagcggatggaggtctggtagtcaaacttgccgtctcccttgctgccgagcttgcccttgttgctgaacctgtaggatttcagctcaccgtggtggccggtgaggtaatactcgttccatgcctccgaggtgatcattccctgggcggcaccttcgtattgcaggttcgccgtatagcggagcggtacgaaggcggaagcacggtcactgcacagtacgggctgtgcggtaaaggtgtactcgtcacccttggcggtcaggtagtagccgtcatattcgttgtgcgtttcggtataaacctttccggctgcgtcttctacggaagcgttgaccaggttgccctgcgtatagtagccggacacgtcatacttctgtaccgacttgcggtagagcgcattttccttttcagtatccagattcttagtaatcacttcgccgaaaccgaggaactcacgttcgtggcggtcacgcttgccgtccttgtattcaaaggcggtggtcatgagcggaccgtcgtcatggataccgtcatccaccgtgagggaagacatcacccatttgccgccgggaagcccgtatgtgggagcggtatgtgcatagtccagcgtaaacgtaccgccgagcgagtttgtgacagccttcagcatgttcgtcctgccgatggcggaacgggtcactttcagctcgctttccttttcggattccacaatgtcgagatagccgtcaccgtccacgtcctgcaaggtgtaattcgtccggttgatgctatggctcaatgatactccgggattgaccgatattttaatcgggataattttaggagtgatatttaccgtaaaggccacattgctgccttctgatgtagaagccgattcattaagagcttctgcacctttccatactaacggagaatcaaatcctacaccgttgttgaaggcaaccatgatatttttaccggatttccatactttatcaggtaatccgtcagagtttatatctgtcagattatattcctccccgcttttggaggttacaaagttaaatccaccggcaaaactgcttgaaccgatattgaaggatgctcctgtcgagaatgactggcccttgccaccttgtatgcggtcaatatcccagtcgataggattggcaaaagcataaccgaagtttaagcgcaccttgtttccggcaataatcttgtccggcagtccgtcaccgttaacatcgatgaaattttcagtactccagtcctcattggacggaggaatacttgcagaaacgggaatgccacctttagctttattgctcgattcctgattggctgcgcttgcctttccggctgcaatatgtctgacgacattgcttacagaaacaatcgcatcactgctgagtgcaaatcctttggactgattctcgcttacaacagttcctatgccgctcaagacctcaccgcttatgccaccgagcgtatttgtatattgtattttacctccggcaacaatatccggataaccgtcgccgttaagatcgatcatcatggattttgtggtagtgctgcccttcgagtcattataggtaatcacgacaccggtctgcttcacggtacttttgctgaccatttcctgagatacggctgctgcacctgtaccttgcaaatgttctcctgccaaaccggatacatccccaatattctcaaacgggtttgtcaatacgacatcaagttccgtaaggcgtgcagcccccatattggtggcagtgatgaagatttcttcacgttgaccagtccaacggtcgagcttgttcaggtctgtgcttaacggcgtgaaaggcattgtcagcggatcaacctttgcgtcttcatcctgtggcaaagttaacagcgactcatctatgggacgggaatagcggttttctgacgcgttatagacgaagccgccccatccacggtacagatgtccgaatcctgccggctcatctactgcatataaattggctgctacggtctgaggttgaataaccgaaggatacctgacttgcacggagactccagatacggcagaaccgacctgactgtcatcagagaacagttcaaaccaaaccttatcactgccgatgtcagatttccgtattgaaatggaatcattcaccataacaccgtcggtaatggcaaatgatttcttgcccaagagcctgtcgggtgtttttacagtcaaagtgagcttgccattatatacagcatttgagaaagtaatgagcggtttgacataaagtgtgctatcggttgcgctcggcaaatacgatgaagcatttgcaatgtgattggcaaacagcgtgtaatccggacaaaccggtcgagcctgttttgttccggttgaatctgtataagaaatgacaggactccatttgactgcatcccaacgcacattggattccgcgctgacaacaaagcgtaagtttgtcaatccttcggaattttgcagggatatggccaaatcatcattatagctttcattccatgggaaggtccgggtatatagctgcttttcaacataggatggattatcattaccatggacatcctttctgtctgttgagccccaaatgattagggtcacatcatcagtcgtttcaggttttgtgaatttacctgatatatcgacagtctgattcccttgtgctatgttcaaagaagttgacgcaaaatacaaggctccttcttccggcttatatattgtcgttgagtaaccattgggcataatttcttcaggtcctgtatatgttacaacaggatgccagagtacttcgtcaaatgcgccattgctcatttccgttgccccagattggacgcggaaataaatgcgatcacctttctttacggataacaaagaaacgcctgccgtgtaggaagtctcatcaccttttgtgatggtcttattccacaactcagactttcctttctgtatagccacacgaacaccatccgaatttttatatgcttccttatcataatcaccggttgggactacaagggaaacagagccggagatacttattgttccggctttgggtgcaacccatacgcgaacagcatcttccattggtgaaatgcgcaacatctccgcttgttcctcaggatccacagcaccgacagagacatctatcttagccgggtcatatatgatagggcttggagtgtctgcactgttcaaggtaaatgtcggtactgcattgccttgggcatctttctctatgtggttgaagtacaccttactgtttgagaccagatcaatcagaccgtccccgtttatatcagagaaatattccttggtcttggttgtggttcttgcatgatcttcaccgactgttgcagcaaccggaccccatcctgcttttacatctgtaccgccagagtaagtattgctgcttgaagatgaaaatccggttataccttttaccttgacaggttctccataagatatttctcctgtaacaccattccttaattgagaccggtaatacaaagcaccattttcccgatataccttatcgggtaatccatcgccattcaaatccacaaaagttgacagtcctctggattggtcgttgctataattgaaaccgcctcctccggttgttgtggttgtcgtgctttgatcatcaggaccgacaccggcatagaatgaaccacctaccgaagagcttgttgtaccaccaagagcagaaggcttgtcactgaacatatccattccctgcaggggattgacaaatccggcatccagcccgtcattgtgcgtgttccatgtttcctgactgtccttgaaggggacatatcccttgtcggactgcacgtcgtcgtagtagctgaacttttggaaagacacctcctgttcgttagagtccaggtggcgcacaccggcgagcagttcacggttgaacgcaccgttccggtactcaaaggcatagcttctgagcacgtttccccggaagttcaccgtcactttctccaacaggcggttggaagaggtcaaatagccgtaacgggcgttgttggtcttcacctgccgggtcttgccgccttcaaacgtcacgacggtatggggttcctgtccggcatttccggcacgcacctctttcaggtagagcgccttggctttcaagccgccgcggacatcttcatcggctgcctcatacacatattccatgaagtcgccgtgcgtttcttccacccggcgcagtttccactcggaaatcacctcacgggtattgccggaaacatccgtgaatgtgcctttcagaacggcaccttcaccgccataggtgtatttcacaccctgcttgtcggtgacttcccagtaatactctgacgggctgctgcccttgcggataatacggctgaagtctcctccctgacgggtatagaactgccggtctgccttgcggggcattttgtctccacggtgggccacacccatctgtcccttgtcgtccatggtcgagagcatggagccggagagcaggtaggtttctgtctcgccggccatgtcatagcgcggcacgccccatcgggtgtccagcgtaatggaaggtacggaaagactccatccttcaccgagccagccgctgccgccctcgctgctgtactggatgccgagtgagggggccatgccgtttcgggcaggcggcatctcaaaggcatactgcaggctggccgttccgcggttgttggcctgtggcggagtaatcagattgattttggccgttgggtcggctgccttgatgtcgttcatcatggtcggcgcaaacccttcggtctccggcgattcgggtgcctgaattacaccgttaatcatatccgtgaagtgggtggttcgtgacactacgcaggcttcctgcttgtcgaccttcactctttccagcgccacccagtgtttggtgtcgttgtcaaaataataggtacggatgtcgtcttcggtgtagccgctcggaatgcgggtgcggtcgtacttcaaccggacggtggctcccttctccgtgaagtgtgtgccgtgcggcaggaaacgtacgccttctccctcggctgtgacattggtcatgccgaaatccagtgccggcaggtccatttcacgcaaaggacgcatggtcagctttctggctgccagcatgacgccatgatctaccagcagcgcaccgttggcatttttcaggctgtctgccttgccttgggcaaagtgtttccctgccgttcgggcagccggagtctgaaaagcgtgttcataatctgccttgcctttcttcagtgtcgggaaggaagcggtcagggtcttgccggaggcggtagtggcactgagcgtgaggctgctgcccgatacgggaacgatgccttcgaactcgccgtcctgcaatgtaagtacggtatgtcctgccttgaccgtccgaaccccgttacggacgaagccgtgcacataggccaggtcgccatagactaccggagtttgtgacagcgtaagtgcctgcccgggtcccgatgccgtttcgacatgcaggttgcgtaccgaatagctcctgccttcgggagccgtgaaaagtatgcggttgacacctgcatgcagccaggccgggtgaatctcctcgcggacatgggtccagccgtcggatgccgtggccatataaccgccggtagcaggtcggtcgttgatgctcttggctacggctccggagtgatccgcaccctgcagctcgtaacacagccagacgcgggcgtccgacggaattgtccgggagaggttgatttcaaagatgttgtcctcggggttgtcggcagtcttcccttcgggaataccgaccgaaccgtagcggagggtggcataggcggttgtcgtgcctgctgcctgtatcggagtggaagaagtgcggtgggcagttgccgcctttgcaggacggctgccgtcttctttcttcctgccgctgtcttcggatttttcttgccggatttccgatgctgtttccatctggagctgcgcattcggagactggccggacagataatgcgaaccggcaatgccggctgccgccagcgtcacggctgatgcggcgatgataattgtccgtttcatgatatttcggttttagttgaactatttggctataatcttccgggttttttcccaatccggaccgatggccttgactacatagactcctggggcgggtgcctcgaagcgcgaacgtttggttgtttcaccttccatgaactgctcgtgaaccagtttgccggaagcgtcgaataccatcagcgtgacatccccgggctggtcctgctccagcacgacatcaaagatgccggtcgtgccgtcaggctttacctggaacgaatcgtccttgttaccgtttccttggctgtttccttcaccgttttcgggccggtctgaccagccgatgagggaaccttccttcttttctgttccattggggagtgtcgggtcgcactcactgcctacatgtaccgtgaagagggctgtgtttgtcttgggattctcaacctgtacattgcccgaatgggtgaaatcgggaattggctctccgtttacggtcagtccggtaatatgtgtttcaccggttccgaacttgatgcacagacgccatgcccggatgttccattgggtaaagcggcggatgaccttgccgttgagcttgtacgatacggtaatgccttccagtcccagcgtgaggacgtctccttccttgatgcggataaactgggtaagactcgtgtgtccgtcgataatcatatatgccttgtcacctctgacgtcaaagccgaactgcgtgatgtcgtcggatattctcggttccacaccgagacggtagttggagttggttcctgtcaccgtccaggaaacttctccggatgcaaagatccgcttgtcgtgtacgtaggtggtgtatagcggtccgcctgttccgtagatgtcgttaccgccaccctgggtgactttcagcgtataggtgccgggagccagtccgtcaatgcggtgagcctctccggtgaacttgccgcttgcaatgatttcatccttgggtacgccggctaccgtatcggctgagagcacatagtcatagacgggggtgccgatgcggatgtcaatgtcgatgctgccgtcattgcggggcttgccgtcctcacaggtggacggggtcgggacggcatctgccgccagtccgtcataataggcaaaggtgaatacatcgctgccgctgccgtccagatcccagaacaggttgtggaatacggtctttccgcgcatgaggtccggccgggagcatttcacggctatcatgtcttccgtatcgaacctgccttccccgctggggtcgatgagcagcagggtacggttgcggcaatactgtgagaactcgtcatccggggtaagcgcatggctgagttctgccatgtttcccgtgtcaccgatgccgccggtacgtacagcggctatgtgcagcggttcttcggaggtgacggcccggataagacctgacattgaaccggaggtttcgggcaggggaatggtacgcgtctggctgccgataccgtcaatgcggaggtagacctgcccgtcttccctccggatggaaacggcactgccgctgactccggtggccacagcagtagtgccggcctgtccgccggagatggcatagacgtttccttccctgtcgaagcggtagccgtattcacaggtgttgccgccggagccggtaaagcccgcatcgaaagtgggatggctgagcgggcaatagaaggagatggctccttcacgaccgggcaatgccggtgtgacggcaaaggcttcggtcgcacttgagtcctgctcgatggtgtccaggaagcctttccgggtaacggtcatgcccgtgccgttccagcgtaccgaggtgctgtctgccgatgccggtacattgctgcgtaccgtccatgtgcggtgcatgatgtgccacagggtatctgccggtgaggtgtaggtggtcagcggaccgttgtcgtcaccccagaagatgtaccctttgtcaggcaagggattaccgtattcacgccccatgacgagcaggcggctggcggacgactccgcataggaattgccgtcgtggaaggtgtcgtttgctttcatggtggcatagacgggtccttcctcgtaggaagtggtggagaggggctggtggagagcggaagcggcatccgagccgatagctgtcacccggtggtgataacccaagttctcgtccttgtcccatatcaggttgccttcactgtccagataggagttgttcagggtgattccatacttgacggccaggtagctttccactttcctgcgttctgccggggtgaggtaacgtccgtagatgatgacttcgggggaatagccgtcaaaacggttgttcccgaatgccgtcgcatcataaccggtactgaactgcggattggatgcggaataagtaccgccgacaaacagattcgatacggaattttctccccaaaggcccgttccgggacggttgctcttcagataggtgagcacgcggacggaggactcccggaagtctgtagcggactgtctgtcagaggaggagaacacgaggtcttctcccgtgtcctttccgtagtccagcggctccgtgccgttggcacgtacgaccttgtcctttgacaggatggagccgccacctttccttccgtcaagggaatagagcagcatatccttgtcgtggctctcgggaggcagggcaaagacactgaagatggtagcctgtgaaaagttggagaacttgaaggaagctgtttttccgtagcttcctcctgaaaggtacagtgccggatgaaaattgaatgccggcgcgaaggagcgggtctgggtgtattcgcttcccggttttccgctgcggtcaagagaacgcaattttacggaatcccctgcgagatccatccagcggtatgcgccttgaaggtctgccgtcacgggcaatgtctggaaccacaactctgttcctttgacaccgccgggggactgtgcacccgctgtcacaactcctgcaccgaatagaagtagcattagttgcttcatcgcttgtgtgattaaggttaatgatgggaaaggttaccggcctttccaatggattgtgtccgctgaagaagtaaggtaggtgcggacggagctacaaaagagagaatatggtccggaatatgttatccggttgaagacatcattccgatgccgacaatgggaggtatagctccagtggcaaatataaggttttctttttgttattgtaaacgaaaagaaaaataaaattcacttttaactccggaactgtataataaattacatatacgtaccattatgcaatttatacaggctgtattttgtcttcgtgtgttgatttatcaggaggtctattaaaaaagatacatgcaggatgtttatttcggaacggcaaaaaccggtgtgttggaaaatagttcggataaaacaattggatacacaataaaacagtgtatctttgcgtaaacaagaagaaatgtttatgaatagaatcaagaaaatcctggaggttaaaggtatgagccagacagatttggcgcatcggttgggcaagagtttcaatacggtcaatctgtatgcagccaacaaggtgcaaccgccgcttcctgttttataccaaatagcagatatcctgaaagtggatgtgagagatttgttgatacccaataaaatgtaaccatgcaatccaatgttgtcctaaacgatttataggtacgatgaatatgaggttgttgtagataacaaccccttcaaagctttttttggccccatttatactactccagctggctctggcggaggtgtaaatggctcattcaaccacttttcgagctctattttcgtgaatgtgttcaatctaagtgatacgacaagattggcgagtccccatttgtactttgcaatgtgctttagccagcagagtagcagcatcgttgacaaagcagtccatatctgtgtctcaacagcattgcgtgatgtaccaatgaaattctttattttcaacagctgcttgatgtttctgaagaatatttcaatcatccaccttgccttgtagagttgcgctattgtggaagcagccagcttgaagttgttggtgagcaactgtaccacatagccatgttcgtcattccagacagctatgcgtctgagcggttttgtgtattttttctttgtctgctcacctgttagttcaataatctcgtcgatgagcacattttgcgccctcgtttcgggcaataaacgttcttcaatttgtgagtaaagcaggttatccctgtgtctgacaacaaaaaacacattcctgctgtcccaatagtcaagaagggagaaatcgcaatagccacgatctgcaacgactacagaatgaggtgaaacgggaatatccaaagcacccctattgtcactgcatttgccatctgtaatgtttacgaattcaggaagaagactgtcataatcaagtaatgtgtgcatcttcactgcgcctttctttgttgtgtaatgtgcccattcgtagagtgacatggtcagcgtgatggtagatgaatccagcaatttgattggcatcttgaaacggaatttggtgcgttgccatatcgtctgctgtccaaaatgagcaagcagtgcatagaatatccgtcggaacacgccactgtcccttttggcattctgataagcgactgttgatttagagggagcgcgacagattccgaggtgattcaaattgccattggctgaattcagtccattggagatatcacgtacagaatcgcatccagagaactggcagaacatcatgcttatgaactggctccatgtgtcgtagcctttgctgtgcttgtccgttttttcttcacgaataattttccttatacattctttcggaagtctaccgattgcttgtgcgaaaagtgttatatttgccataggaagtaaaagaggtggttctctttgctaaggtagttcattctaccttagctttacttcctttttttgtttttatcgaaaaacgtttaggacaacattgattcgaaagtacaaaaatattctgtaacacgaatgtttatgattgaattttatgattttggctatattttgtatggttgccggattgttttgactgggtgttgaatccagtaaattgttatcggaagaaataaagcatacagccttttgtataaggatataacgaaaaagagagcctgccgtttttcagcggcagactctcacggacagagttatttaaaagtagcttagaatttgtatcccaaagtaataccgatattggcattatgtggagcatttccgtccttcactttgcagaaaccgagctgggtatcgagaccgaccagaatcttgccgaattctacccctaatccgatattccatccggcatcaaaacgattgtagtcaaggccgtcgctgccaaaagtgtcgactttgtctcctccattgactgcaatgccgccaatagaagctcctccgtcaaatttagtcttaccacctacaccgcaagcaaggtaaggaccggtcgcgatgaccagattggtgttgtctgcaaggttaaagcggaactgtacattgataggaagttccagatagagttggttgatctttacgtctgcatcggcatcaacgacggttccttcatagccgctggagtatttggcccctttttgtgagaagaagagagaaggttgcagagaaataaggtctgtaaactggtattccatacctactccgatgcgtgctccgggcttgaatttggaatggtcggaattttcaccaatatagctgctcaggttcagaccggcttttacttgaaaggagacttgggcgaatccgatagtgcagcataacgcaaacaagacagttaaaatactttttttcatgattatgttcattttaagtttcaatcaaaagaagtcggacacttggcatgtccgaactttcacacacaatgtagcttccaagcggattagttttcatggatggtgcagatgcttacccgattccaatctggttcttcaaacatgtttcctacaccttgtccttcggctgtaatccggttctcggctattttataccgtttcactaacaaactcttgacggcatccgcacgttgttgagcgatacgggcatttacttcggcctttccttccggagaagcatatcctttgatggatacagtagccttttcatgatttttcaagtaagtcgcaatacgttccacattaggggtctgagaagctactacactgacacctccttggcggaaggttaccacagattccaatgttttcttgtggctggtgatggtatctgttacgataaccggaccctgattcttgcagtcggctaactgttgttccaattcagcatttcgttggttggcagcagtcagttcggcttcttgatctacgttggtttgtctcaggttatttacctgctcgttcagcgcatccacttctgcctggtcatacagtttggcaaaagagatatggtgtttgccattgctgcaacggaagtggtatttcagaccggctgtaatttcccaggctgcccggttggcgttaaatcctacgtttcgttcaccacatgcgttcagatcatataccaaggcaggtttgatgccaatggtccaggctttggcttcacctaaattgaaattgaagttgagtcccagtttgctggagatgctgttacggtctccgttaccgttttgggcataatgcagccaaccgaggccggctacggtttctatttcgaataatcggggtgttccccaatatcctgcaaataggttgctcagattgacggaggtcaataaacttacattggtgttgtcaaatgccgttttgctggcagtcgtattgatgctggtcatggcttccacacccataccgaaaaagggtgtgagctgtttacctattcccagtccccatgtggctcgcatgttcgggaaaaatgcactgtgggtcaatggagtggtaacaccggcatggatgccaatagaccagttatctcccaagttggctccttcgtaagctctttgagcatagatgccactacaagtaagacaagctacaattactgcaataaatttcttcataagaatgagttgttaacctcaaatccgcaactacgcgcctaatatgatacagaagcgaaaagaatctgcatcgttagtaaaaagggggcacagtgcatcgaatgtcaccataaagacatataaatgccccttaccccaccatgcgacttgaggcaatacgcaaaatcacgactataagttgtcggtgttatccaaagtcattctggaacacattggcataagcattgttgcatgaatagatattcagcacatacttccttgatgtcctgacccatttggctggcacagagatgaacttaaagacaaacgtcttgatgcggcttgttgctttgagtccgaacctcttcacgtcaagcctcgccatgatgaatttatagaagttgcgtatgagtgccataagcagaagaaacaccgtgttttctcccataaaggattttggaagcctgttccagccgaatccgttattcatatcatcgaagatgcgttccttccctccacggaggttatagaattcgacaatctctttctcggaagactcgtagtcatttgtaaggatgcagcggtaggtgtattctccttcccacaggtcgagttcgccgtctatccgcttctgtctttgaatcacaagacggtatgccttccctttccatttctcgatgagaatggaggccagctcaaactcaatgccgcccaattccactttcttccaacctctgagggcaaagatgtcattgtagagcgaactgcatcggttagcacggatatagaaggtcttgcagtgtttagcaatctcttccactatctcttcagaacacgagccgcaatcagctctgaaacggttgataataagcttgttttgttcaaacctttcaaagaacctcttcagcgtgtccttctggtggaaacggacatttgtgttgccgtcgctgttctcaatgccgacaatcaagttgccaataaccgccacgccagggcgataaccaaggaacttcttgtatgtaggcttcgcatcaaacttctcagcctctatgaactggtggtcgaagtcaacgtcatacccctcgccctctttcagctgccctgtggacaataggcaattgaggagcagtgtattcagcttgtctgccgtgttgaagtcgtaggtcttgccagtgtcggatgtgtaggaaatgttatcctgggtcagttcctttatggctctaagaatcgtgtcggcactgcatgtgcgaagtgtcggatgaagcgaaaggtggtacatcagatgagtggtgacatcctcgatgcatgagccgccacaaaaataaacgctcataagcgaacggatgatttcgctgtattgataaccatacagcctgcatctcataccgagggttgagtcgattacagatgagagtctggagtcaaattgctccattattgaaaatattcctccaaaaggagtgagtttctcggatttaattgctacctttgccatgtctgtcgggtttgatacatattttgatttgcaacactaagataggtgaaaaatctgacatggcaaattcctgagcaactttttgttgctcaggtacttaaaaagttatatttgtaatagtgttgcggaattaagggttaaaagtttagggctgcaatattagcagcatttacaatccgttgttattgaaaggctttctaattaacaaatattaaacataaatcaatacgaaaccaatcttttggctctctatgggatctattcataggggcactgggaaaatccgatgaagatattgctggacatacggaggtcgttggtattcatcttcagataatcggagtgaagttcttcatggtatggctgtgacggattatcacgtatccttaattcccaaagaatgtgctgtagaacatggaatcggatggaattcaaaacatctgcttactttttcacaagctatggtcatatttcccaagaaaaggatttgtgtctttgcttttatttatacatttgcaagcaacataggtaaaatgacctatttctaacaaaccttatagtatagtttaattaaagattaagaaacatgaaaaagtacattgctgaaatgttgggaacgatggttctcgttcttatgggatgtggtacggcggtcagtttgtcgtgtacgtcagctaaccctgatttagcttctactgttgttggtacggctcttgccttcggactggctgtcgtggctatggcttacgctattggcggtatttccggctgtcatatcaatccggctattacactgggttgtctgttgtcgggacgtatcagtggaaaggatgccggtatgtatatgctgtttcaagtaatcggcgcctttatcggttcaactattttgtgggtgctgacttccaattccggactagtcggcacgggagccaatgcttgtcaggaaggtgtttccgtaaccggagctttgctggcggaaatagtttttacctttgtttttgtattggtagtgttgggtacaacagatgcaaagaaaggagcaggcaactttgcaggacttgctatcggtctttctttggtgctggttcatctcgcctgcattcgctatacgggaacttcggttaatccggcccgtagtatagctcctgccattttccaaggtggggaagcgttaagtcagttgtggatattcatcgtcggacctttcatcggtgctgcattgagtgccggagtgtggaaagtgtttgccgacaaacaaaattgataatgtagataggattgggtatttaaaaatagcatgaacggattagtcacatttaaaattgaacgattatgaaattgaaaatgtattttataatgttggccttgggcctgttcagcttcgcaatacaaagttgtgatgatgacgatgaggatgctcctgtttcagaacaactggagaaagcttttaccaatgaatttggcaacgtagcccataactggtctacgcgaggtactaatcatgttgcatctttcaatcaagacaatacagaaaaagaagcctggtttgatgcaaatggagtttggctgatgacagaaacggacattgcttacgatgctcttcctgcaccggttaaacaagcatttgaagcacttactcaatatgagggttggaagcgtgacgatgtggatatgcttgagcgtaagggcatggagaaagtatatgtgattgaaatcgaaaaaggcaaggaggaattgaatctcttttttgatgtcaatggaaatctgttgaaggaagtagctgataaagacgatgattcgttcaactatttaccttctgaacttcctgctactgtagctcagttactgaatgagaagtatgccggttataaattattggaggttgaagtggatcctgtttccaaactactggaagtagatgtccttttgcagtctgccaagttggaggtttgctttgacgttacagcatcctatgcgtgggtttccacttcacaggatgtgcagtatgtatctttacctgatgtcgtaaagactgccgcacaaaatgccgtaaaagaacatgctggctatgaactggatgatgaggaagcagaaaaggtggtgactcctacaggtacctattatattgtggaattggaaatggatggaaaacctgacattcaagttgaatttaaagaagacggtacactaaaacaataagattcatgttatactcaattccaataaaagaagagagccttttgctgcattccagtaaaaggctctttcttgattatacaagtacggctaatttaaaaacgataagcaaatccaagattgaatacagcctgatcaaaatcactgactaattgatagcggaactcaaagttcatcatccagtttctagctattgcgaaatcaactccaccaccaatattcatgccaaaccggcattcattgtcgctgtcgtcatcgccatctatatggacgtgatttccgtctatatccacatctaaatcattatcccagtcaaacatccaattggaaaatgtcagaccaagcaacgggtaaagtttcactttgcttgctacaggaaacaaatagtggaaattcaagtttacatccaacatgctgacgttgtcattttcaaagaagtagttcaatgaaggttccaaacgtatagggttggtgatattgtactgatatttcagtcccaaaccaacactctcaatttctgttccataacttaaaccgaacccgattgcttgttttcccttttgtgcataagtgttgccaacaagcatcaaaaaacaaactgctaaaaataaaatctttttcattttggtatgtattttgtgtaaaattagtcatcgtcatcatcccagtcgtcatcatcatcatcatcatcgtcgtcccatttatgacgcctgtatttcttgtattttttgtgatgatatctgtcgtgatggtcacaataggaacaataatgtttgtgccaatatctgctatggaaatcaatcctgtcataaaaaggattgtagtaatggcttcccggtctgataccaatttcaatcaagacacgattccatttccgatagcgtttataataatggcagatgtcacgcatgtgtttgccggaagtccttgctatttcaagggctaaaccaacattaccccagtcgcgtccacactgtctgtaatagtcatccagaagactgccgcgcgtgttatattctacgcacaatcgcttccggtagtcggacagttccacagaggcatatttattagctctgctgatgaacaaggatagcctgtcttgtgcaaagatggaacaagaaacagccatgagcaataataaagtataaaatttcctcataaaacaaatgattggtaaaattgtggacaaaggtactataaaatcattagataatgcattgcatttgaaaaaatacaatcatttgttgtttttttcgtcaaaaagatgtttcaaagcagatttttgacaggaatgatgggtaaaattagccaagcagtgcttttttataagaacggatagctgatttctaattctatttgttacctttgagaatcattgtaaaatatggcttatgggaaccttgggatgcatcaatgacatgttgcaacgcgataaagaaaatcgggagctgcgcaaacggaatcgggagaggttaacagacacctaccaccggttattagatacaggaaaagagactgacctctctttgatgacgatggaaaaaatggaagatatccgccggaaaactttggaaaaagaagagctggataaggctgcccattttaaggcgatgctttatttagccttgggaatgacattgatttttctcttgatatggttacttgtaggatgtagcagtaaaccgtccggaaacaatcagtctgcggtaaggggtgattcaacttcgattactcaaggcgttcaaacagtttccgttcatacccaagacacaatctgccatcttccagtagccactcagagtgtaaaggattctgtgtttacagagcaagaactgcaaaagatacagaatgaactgcgagaacgatatgcgcgttcagaaataaagggcactcgtttagacggcaatatacaggcatggagcgtaatagggaatcatcttgtcgtgcaattatgcttaaactcgccggaagctagagccgtttttcgtgagaagattatggattcacctgctatccgttttgaagggggcacagaaccgacacccaacaatcaacgatacacttccgatactttgggcatccatttatatcctgaattctctgcatacccatacacggctcgtaccgccacttttgtactattcaatcagagcgagcacgagatagagtgtggagattcatacaggattacctatgaagaccagcaaggagtctggcgaactcttcccataaatacaaacttccactgcattgcccacatcatcgaacctggcaaacgatttctgtttaaagctaacctcaacccgaatgtcctgcccaaccgaccaggcagatatcggttcttctataaggtagaactaagcgataaaaaacagaaaatcatgcttatgactgaattccggctggcagatatcaaagaaactgtccgtgattcttccgatgtaatcagcgtggaatatgtaaattacccccgatgagagttgatatggttttatgactaaatttcattttcgatgtgccattgtctgattttgaattccatatacacatgaaacgcttttttctatccttcatactgcttgggtacttctttcaacttgaagcacaagaaagaacagccaacgacaccattctgatgttggaaaacaaaatatggagagccgaacttccttctgaaaaatcctatacgcaagagatggagttccgggactatgggttgtatgctacttttacttacaatggaagaaaagtcatcatggaagactcttattgtgtttgtggtgacaccatcaaaacttccttctgtaagcagtatttaattttggaattgactgacagcactcttgttattcgttatattccccaaagactggtcataggtaatggccctgtaaaatacgccaacacgattaactcaccggccaaaatgcttgaaaacgagcaacggttagacagtatttggaggaaagaaaatatttggaacaagggtgttgctgatatttccgggaagcctatcaaagatttgtcaaccattgaacctccccgatgggccaaatgggattacgatttgacaaaatactatgtttcccaaatgaaatacccagaagagttgctaaaaaagaatgtggcaggttattctgtcgcgatgtttacgattgatacattgggagttccaggtatagtcaatatcctgactaccaactacaaggaattcgaccaagaagtaatccgattaaccaaagaattgccacactgtctgccctgtcgagaccaaaacggcaaacggatggaatgtctttatacggtgtatgtacctttcctgccccaacattatagggatagggtaaaggcggacagcattggagaagaagaattgaaacaaagctttgtggaatgggaagctgtgtcttattttgaaaaagcaaatccgtatgcagttaccgactatattaatgaacgcctgatatacgattccaagctattaaacggtaaaaaagaaatcaaagggatttatacgatacgcattgattcttacggggaaataataaaagtagaaaccttacgaggttgtggcatacaagaatgggacaatcaagtattgcaaatcataaaaggtatgccacggtggactcccgccatcaattttcatggtaaaggtgaatatcggaactctgtttggactgttcctgttttattcaagaatgatagtacaacaagaaacgaactgcatgattataactggctcataaaaacgctgagcagagagtgtaaatatcccgttgcccagcaaagaaggaacaagggttgtgttttacaggtggaatatactgtgaccccagaaggttatatcagccatgctgcggtactcaatcaagcaccccgtgcattccgaaagtcggtgatgcaagtatttcactcgttacggaatgtacccactgtcttacgccccgggaaaagcattctcagcatccaattctggctggataacatggcgaaaggtcctcacgcagatgttttgataatcggctacacttcttgtgacacccctgtcttgatgcgatatgatgccgtgctgactgcccatactactgaacctcatctggaagtgggtgtaccggtctgttatctgaatgaacgaggtgatacccttgtgccttacgggaaatatcggtattgtcagacggatactatcacggaaataggctttgtatatgagaacaaatcgaagaaggcccgtattgtttgcatcaatgatgcaggcaaagaactattttacgtttttaaatgtgataatgggccagattatctgaaagaagggctttttcggatgatggatgaacaagggcggataggctttgccgattcatcaggcaatgtggttatccacccccaatttctgtatgccactccgtttgcaaatggtcatgcttatgtaactgaacatggagaggaaagcaaggatagagagcacacgacctggcagtcggacgaatggaaaatcattaaccggaacggcaatgaattgctggaatacaccgtcatccggaaagacaaagccatcaaaggattgcttatccgatattcccatccatccggaagcatgcggactcttacctatacctatccggaagatattgctcttgcggacaattttcacgcagaggtgatgcttaaagacttgaactttgacggacaggatgacattgccataccgttaggcaactatggaaatcaacgcatccaatatgaagacggttatttgtgggataagacacaaaagacctatgtccccgtcaagcagctgaaggaaattgccaatccgcggattgacaaagaagagcggtgtctgttctccttttcccgcgaatcggcagccagctaccattatgaacgatttgaatatgtgaatgctgagcttgtcaagaccgccgaactcatccagacttaccgtcaggcaggaggaaagcctctcttcaccgagaagcactatcagaaagggaaaggtatgagggtagttcattcatcggttcctatccgcgaaatttctcattactggttgaagattgtgcaaaaatgaactttgggcagcatcaactaagggaatgttttgtatttttgcatccaaaaacctttatttatcctattttgaagaggaggacggattatgaaagttacggttgtcggcatgttatgctgtttgctgtctcttgcttgcacggataagcagaagacatttttgccggaagcggttccggcctcggctattgctgttatcggaggttcagagcaggatacgactgcattgacggtagaggggaataaagccattgccccacagatacaagacagggatacggtcatttatgaaatgccctcgtattatctgtggtatagaaaagatttgccgaaatcttatcgtaagcaggaacatcagtttcggacagagcgtaaggtgtattggcaagatgtgaaggtcatcaatgtctttctggccaattacacggatgtacctcttgaatttaacggagattgggagcttcagcaatggaatggtcaagattgggaacagccgcaattgaagtatttgcccgatacagcagagacagagtggataaacgatgaacaagcccattgcttgtattgctttcgcattcccgttggtgatttttattatttgccgaagggacgttatcggataaataaactggttgctccccataatcagcacgtcgtttgtctgtctgccccatttgaaattccctaaagtcggttcgtaaaaaacattttgaactaaaatcaagtatttgcgtatgaaaaagtatggactaattttcatcatgagcctattggtttgtgttacgatgaaagcgcaggagtgtgagcggtatatcgaagtgaccggaacgtctgaaatggaggttgtgccggatgagattcattatctcattgaaatacaggagtattttgaggaagaatttgatggcgtatcgaagcctgagcaatacaagacgaaggtacctattacccgaattgagcaggaattgatgcaggccatccatgatgccggaatccccgattctgctgtacgcgttcaagaatatggcaacaattggcgacatcaggggcatgactttttgatctcgaaacagttggacatcaccctgcaggacttcaagcagattgaccggattgtccaaaagcttaacacccggggcattcactcgatgcgtatcggcaagttggataacaaggatatactgacttaccaccaaaaggccaagattgaagccctgaaagcagcccaacgcaaagcagcttatctggtggaagcgttggataagaaattgggttcggtgatacgcatcgtagaaaataccaatgcaaactcaggaatgttcggtgctttacaaagcaacgtgatgtcgatgaatgccggaggatatgataacttccgtaccatccaactgaaatattcgatgacggtacgctttgaaataacggactggatgagccgctgattctatcacgtcaatttgcccgtctgatgagctgacaagcgttttttatcgaatgtatctgaggaaaataaaaaagaaatgcttaccttgcgccgtgcagtctttgaaggctgtacggcaaataaaatactaaccttaaaagagaagattatgagcatttttttgaaagcggtgcaacgcatcaacccttcgcaccccgatgaacccaagaagtggtaccccgtgcaatataccactaagatggtggacgaaagtgaagttgcccgaccctagattgccgagttgggcgactcagcaaactgagttggaggcaacttttgtagaaagaaactcaaggcaaaaacagaacggagtcaatcgttggaatgcttctcttcttgccgcttttctttttgctctttctctgcctgcatctgttgccgttctttgttctgaatcatgctcataaaggaagaactgatgataccagtaggtatcgctaccatggctacaccgaccaggcagatgatacatcccaacaacttgcccaatggagtgatgggataaatatcaccgtaacctaccgttgcaaaggtgatgatggcccaccaaatgccgtcaccgatgttttcaaacacatcgggttgggcattccgctcgatgtaatacatgaggatggccgagaaacagatggtaatgaaactggctgtataggccgtaacaagttcctctctgacggaataaagaactttcccaatcaaacggaatgaacgtgagtgccgtatcagcttgaatatgatgaaaatataagggaggataatgatgtgcactacttctgtgttccaatagatataggtcagcacacaaggtaggatggctacaaaatccacaaatccgtagaaagagaatgtataatgcagacgtgccttaatagcacttttcgtcggatgaagggctggcgcggacaagatacgagctgtatattcgagcaggaatacaaacgaagaaatgtaggtgatgccgaataaggctaaccgataccgggacatctcttcaaaagaactggcaatgactgccacaatggaaatcaaaatgaagaagagtacaatataatgcacccagtttttgttcaaaaagcgttgaatggctacatataatttcatgatgcggtaaacttggattgaaaaataaatagggaatgtatgctgagataccttttcaatgaatcgtaagttttttgcttatcggcaaccggtacttagttaaaacaaggcccttttctccaggatatgggaaaccggagaaaagtagccttgtctgtcatcttccctatgtcattggaaaatataggaatcagttctttcttttggccagttcgagcacctgcacactgcctgcagcaaacagtcccacgtgtccgttgggtaacatgccgaaagtggttacttccttcagagcggctaatacctcaaattcggtttcgatgtttgggcaagtcatacgtgtgctggaaataggcaggaacaccaatgaattggatggtttctcaagggtcttgaacttaccgttcatctggttgcatccggcatttccactaagtgtcttttccgttatgtcgagtgagaagaaggggcggttctccatggaatccggcaaaacttcgccgttcactttcaccacgtcccatataccctgcaaatcagacagcggcatcatgaaacagcgtctgttcaatttggccaatggttgattgagcgaatcacacagcagaatctgatcggtgtctccccgttttactttctttatcagggaaagtgcgtgtgaaagtgccttttcctgctccatatccggacatgccatcatcgtggaagccagtttgtccatcaccatccgtgctgactcgtccgaccattcaaacgaacccatcagacggttgcagcctccatatccatacaccctcatctcacgggtgtcaaaaccgatgaaaggctgttgtttcgtattcaccgactgacctgccagttctacgacattccattccccttcaaggtcagacaaggataccggatttccattccccatgcaggatgctaacgcaaacagggctgtcaacatcccataaatcattgttttattcatttttctcatacgtttaattatcaaatcaggtgttgaaggctatctatatgctactgcggagcgccttctgctccctgggcttatttcctaaatcagacgcaaaggtagcaaaccttgtgatacgaatgtatcttttaggcaaaaaatgcaaagttaatcagttgataattccttttaagttctatgcgatgcaaggtgtgtggaagcatgctgcattatgccttcaactgcaacgtaaagcaactgttcttccaaaagtttttcaaggaagagttcagataatcctcaaatccgcaactacgcgcctaatatgatacagaagcgaaaagaatctgcatcgttagtaaaaagggggcacagtgcatcgaatgtcaccataaagacatataaatgccccttaccccaccatgcgacttgaggcaatacgcaaaatcacgactataagttgtcggtgttatccaaagtcattctggaacacattggcataagcattgttgcatgaatagatattcagcacatacttccttgatgtcctgacccatttggctggcacagagatgaacttaaagacaaacgtcttgatgcggcttgttgctttgagtccgaacctcttcacgtcaagcctcgccatgatgaatttatagaagttgcgtatgagtgccataagcagaagaaacaccgtgttttctcccataaaggattttggaagcctgttccagccgaatccgttattcatatcatcgaagatgcgttccttccctccacggaggttatagaattcgacaatctctttctcggaagactcgtagtcatttgtaaggatgcagcggtaggtgtattctccttcccacaggtcgagttcgccgtctatccgcttctgtctttgaatcacaagacggtatgccttccctttccatttctcgatgagaatggaggccagctcaaactcaatgccgcccaattccactttcttccaacctctgagggcaaagatgtcattgtagagcgaactgcatcggttagcacggatatagaaggtcttgcagtgtttagcaatctcttccactatctcttcagaacacgagccgcaatcagctctgaaacggttgataataagcttgttttgttcaaacctttcaaagaacctcttcagcgtgtccttctggtggaaacggacatttgtgttgccgtcgctgttctcaatgccgacaatcaagttgccaataaccgccacgccagggcgataaccaaggaacttcttgtatgtaggcttcgcatcaaacttctcagcctctatgaactggtggtcgaagtcaacgtcatacccctcgccctctttcagctgccctgtggacaataggcaattgaggagcagtgtattcagcttgtctgccgtgttgaagtcgtaggtcttgccagtgtcggatgtgtaggaaatgttatcctgggtcagttcctttatggctctaagaatcgtgtcggcactgcatgtgcgaagtgtcggatgaagcgaaaggtggtacatcagatgagtggtgacatcctcgatgcatgagccgccacaaaaataaacgctcataagcgaacggatgatttcgctgtattgataaccatacagcctgcatctcataccgagggttgagtcgattacagatgagagtctggagtcaaattgctccattattgaaaatattcctccaaaaggagtgagtttctcggatttaattgctacctttgccatgtctgtcgggtttgatacatattttgatttgcaacactaagataggtgaaaaatctgacatggcaaattcctgagcaactttttgttgctcaggtacttaaaaagttatatttgtaatagtgttgcggaattaaggataatctattttttgtgttactttgcacacccattgtaggtcgggagtgcaaattccccgaccgatattctatatattttcacagagactacaaatgtaagtagtctctgtttctttttttagttgaatgcatgttgtattccactctacgatttacccaaatgctttagaactctgattatctcacgaatataccttgggtcttccgcatagccaatcttatgcagccatagcaggtagttccctcctttatacttatactgcaccttggtatagtaggcccggacactttccgtccaatggttgaactcatagtacttcccagttttgggattcgttagcccgaacaggttgtgccggttccggcagagcggtgaacggaaccagcccgtttctagtatggcctgtgccaatacaatctttggatgccggatgccattgcggatgatttcccggtagagattaggaatggtgagtgcaggaagtgcttttttcacacaagccgtagttccttcagttcccttatcagacgctttttcgtgggacacccttgcgtaaacttttcgggcatatagctccgaaagcagttttacaggcacctctggggcaagggagtctttttctgcctttttgcaagactcataagcgcctaaacccctctgtagggtatcaggagccactttttgcttcttttccggacggatttccttctcttttgtaattgtatagaactgtgccgatgctgaaacggaaccaagaatcagcaacgcggcgcaaagaatgatgttgtgcatttcttttcaatgatagggttgacaatacttttgcgggtgttcaaggcggttccgaccgcaaatatatcgttttacttaaacaatacgaaaatgcacaacatcaatcattctgaaaggctgccctacgagaagttggcggcattgggcattgaccgggaaaaggccgacagcctccctcaggaagtgaaggagaaactggcctccggagaggtcaccccgctcatgcaggtgtccatcagtgcccgcaacggagacatcatcacgcttcccctcaaacttcagctggtatcggataaatacggcaacccggcactcatggcttatccggtacgggccgtgcttgaaaaggaacgcagtccggtattgcgtttgtcggagcaggaagcggagcggttgggtaaaggtgaggtcatccagaaatccgtggaggtcaacggcgagaaaacccagcagtatctgcaactcgatcccgaaaccaaatccgtcattcatcgccgtgtcacggatgttcagctggagcagaaactcaaggacatggaaaaggtcaacgacatcgaactgggcatgcagcaaaagcagcaggtacgcgagggaaaacccattgagctgaatgtaggtggcgagaaagtgtctgtcggtgtggatttgaaagagccccaaggcttcaaggtcattcagggcgacatgaaagagtgggaacggcagcagaagctccgctacgacgagcagcatcccgaatacctgggactggtgatgacggacaagaaccgctgggaataccagcaggtggtggacaagcagtcacaggaaagagccttgaaacttcgtgcgccgaaagctgaacaatccaaaggtctcaaactctaaatccttttccctatggtcaagaagaatgcagagaaggatgtcggcttcgtccggcagttcaacgaattgaagaagaaacatcccgatgcggtgctgcttttccgtaagggtgacttctacgaaatgtataaggaagatgcactcaaggcatcggtgatactggcgctgaaggtatcagacaagattctgcctttagagaaagaccccatcaaactcctgacttttccccgtcatgaactggacaaacatctgcccaagctgattcgctccggtcagcgagtcgccatctgtgaggcgatagaccgtccggaactgatgaagaagcccagggaaaagaccggggaagatttgaaagaaacgaacatctctaacaagaatactatggcgaaaaagaagaaagaacaggctgtgcaggaagagcctaccaagacagtcaagatggctgcagaggagaaacctgccaaggaaatgaagagtgaacaacaggccgaagccaagcaggaacgcaaaccacgcgaaccgcagatgattactgccaacggcgagaaagtcagccatggacatgcgttccagagcaccaccaatccggcagattggtacttcaccgccaagattgacggcgtacagctgaaaccgcagaagatggacgcagcggatttggctgcttaccagaagaaggaaatgacggtgccccagctgatggaacgctattatcccactaagctcatgccgaaggtatcggaagaagcctaccaaatgccaaagcagttgtctggtcctgatggtgccattaccatcgacaagttcaatgtctataaggaaaaggacgagcagcgaccggactacggcaagtataagttttatgtacagatgggtgacaccaagatgtcggcagtggcatcccgtgaggacctgaatgcctacttcgaccgcgtggtcagtcccacacaactcgtggagaagaacttcggggaacgcctgcacctgcagtctgcctacgagaagtaccagcttcccgaaggagtggaccccaaaggagtccgtgtggccaaggaccactccgacaacaaatggaaggtgtcgatggacctgggcgacaagggcaagaccagcaagcatgaactctccttcgatgacggctactcgctcttcaaggcaaagactgccacccgggaacagatagcagccaagtacctcaatacggaaatcacgggcatgctttcagccgtgaccaacaaactggagaagtcggcttccatgaaaatgtaacaaaatcaagagaaacaatcgaatattcaagaaataataaaagacgaaaagatatgacagctaaaaagacacacgaggagttggtggaactccttcaggccggtaaaatcggtttcctccgctttgtgatggacggggacagtgcagaggattatttggaatggtgccagacccacggcacggatccttcggatgaatccgcagagttttatgtcgaacagacggacatcgaccagatggaccgtcaggtaatggatgacgaaagctatggcgtatggaactaacacatccggcaatgccggacaggtagccatcgaccgctttgccgaaatgatgattgcccgtatggagcagatgaaggcttccgactggaagaaaggctggattggcggtgcatccggatttgcaggtctcccgcagaacgtgggaggccgcaactactcgggttccaattccttcttcctccagctgcagaccgctgcccagggctaccagctgccggtgtacctcaccttcaagcaggcgcacaacctcaaggcccatgtactgaaaggtgaaaaagccttccctgtggtctattgggacgtgctggtcaaggacaagaacggccataaggtcagttcggatgagtataaggccatgagcaaggaggagaagaaaggcatggatgtcattcccttcttcaaggctttccccgtatataatatcgaccagaccaacctggcagaggtgcaacccgaacgggtgcagaaactcctggagaaattcaaggtgcccgaacttcgggacaaggaaggcatgtatgtccatgccgctctcgaccggatgattgagacgcaaggctggctctgccccatacaggcagacaaacgggtggacggagccttctattcaccagctaaagacatcgtggtgctgcccatgaaggagcagttcaacatcggcgatacccccgaggaagtctaccggggcggcatggaattctattccaccatgctgcatgagatgtcacactccaccatgacccctgaacggctcaaccgcgagatgggcggacgcttcggagacccgaaatacgccaaggaggaactggtagctgaactgacggctgccatgatcagccattcgatgggatttgacatgaaggtgacggacaactccgcagcctatctggattcctggattggggtactgaagcaggaaccgaagttcatcgtttccgtcatggcggacgtgaacaaggcttcggatctgattctggaccaggtggacaagcagcggctggcactgaacgagcagccctacctgacgaagaacgacccgtttgctccgttgagtgaaggcgaagaggtgccgttcaagaatgcagccatcgtgaagacacgcaacggggattatgccatccgtgcttcctacgatggtgtggaactgggtttgaagaaggtatcgaaagatacagccaagacctatttccagctgacggactacaaggacaaggctgccttcctgaacatgacggcgcacaagaccttcgaaccagagatagccaatctcaaacgcacgcaggccgtgggtgccaagttaagcatctgattttatgtagaaccttcaattccatgaaccatgactgattacaaggtaaacttcaaggacctcaaagccaaggtaggcatcgatgatgtagcctatgcgctcgggtaccgtctggaccgaaaggccggtgtgggccgctacatggagctggtgttgggtgatggcaaggaaaagcgggatgcgctcgtaatctgccacccccaggacaaggcttcccagcggttcttccgccgcgacggttccaagggggatgtggtcacactcatccgggagaacctgaatgccttcaacgtatcgggcaaggatgaatggcagaagatagccaaggtgctgtcccgctttgccaacatgcccgaacccgaataccgcgaggaccgggagtatgtacagtcagccaggtatcatgccaccttcgacagccccaggtatgaggtgaagccgataaatcccgacaagattccggccatcttccaacaaaggggattgtccgatgaaacggtacgcaccttcgctccgttcatccggctcatccgcgacaggaagaacgagaactttgacggctacaacatcggcttcccttataccaacggagagaacaatcaggtccgtggctacgaaatgcgggggtacggcggttacaagtccaaggctgctgggagtgattccagttcttctgcatgggtggctgacttgtcaggtggctatccgaatgtggtgaagagtgtcttcttctgtgagtcggctttcgatgtcatggcattctaccaatggaaccggaggcagctgaccaatgaaattgccctggtatcactgggcggcacgttctctgacggacaaatccggcaggtgctgaaccgctttcccggagctcgcccgtttgactgtttcgacaatgacctgcccggtcgcatctacggtttgcgcatgatggcgctggtagagaacatccccttgaaaatcaaccgaacccgtgacagtctggaagtggaagcgaacggacgttccttccggcttgatccggagcgaccctttcaggtgcaagtcaaggaacacctgtcggtcagatacgatatgggacaatggcttccacccaaggctttcaaggactggaacgactgtctgctcaacaaaccgatggaggtgcggctgcatccgactaaacaggaccaaatcaataacctggccgaacgcagaaatgcaggccctaaattataaacgtatgaatgtaagacgatggaaacgctccttgttaatcgctgctgttggcttattgataggcaagactccgctctttgcccaacagaccgacccggcgctgacttctgccgtactaggtcagaccgcagccttgaagaagatccacaaggaccgcaaaaagacgcaggagaaaatcattgcagcggaagtggccgtaaccgcttcgttagagcgtattcaccatgtggaagacaagatgctggactacctttcgaatgcgcagggtgccatgcagaacctctaccagattaagcgtgctggggaactggtggccaaggaaatcccgcagaactgcagcctgctcctcaaatcggtgggcggcaatctgaagggaaccgtcattgcggccatggtatcggatgagctgacggatgctgccacacagatgacggcactctttcccttcatgaaacagctggtgacttcgggcaaatatgacgtgacaggagatgacggaaagaacgagaagcacaaggtgaacctgctgaacgcttcggaacgctactacatcgccaacgaggtggtcagccgtttggaagccatcaacaccgacctgtttatcctggcctggcaggtacgcacactctcatggaacgacctctggttttcgcttgatcccgaaggatgggccaacgtgatgtccggcaagaacatcatcggcggtatcatctcggactggaaccagggctacagtctgaaatggtaaatagataaacaagtaaactaatttactaatcacaaagtaatcaagtaaggaaataagaaagtaatcaaagcaataagtaacagaatcatatagtaaacaaatcatccaaaaacaaaagcgtatggaaaagaaaataatcggtcgctgtcccttgtgtggcggcaacgtggtaaagacctgcaagggctaccgctgtgagaacaacatcgccgaacagcctacctgtgtgctgaatatcaacggcattatcggcaaccgcaagatgagtgacgaagaaatcaccgaactgttggagcaccgcttcatcctgttggacggctttgcttccaaggagggaaaagccttcccttccgtgctggaactggcagacaatggtgccatcaacatgcagtccgtcatcggcaaatgtccgcattgtggcggtgatattcgggtgggtacgagagccttcaactgctccaattacagcaaccagcaggcgccgtgcaactttgccatctggcgcaacattggcggccaccagctgagtctgacagaagccaaggaaatctgtgaaaaagaaatcacctccaacgaactggagatgtatcgtgatgacggcaccatctaccgcaagcgtctcggcctttctcccgacaaactccaaatcgtgaagatatgaaaccgggaatgaaaatgattatcatgctggtaaccgccgtcagcttttggggcggactgttttacttcgccagctgttccggccgacccgagaaacgggcggtggaaatcgcagagagagccttgaaagcaaccgttgataatccggagtccatccaaatcaagggcatcagcaaggcagattcggtattcggcaaggaatatgtcaatcaacatgaaaaggctgccctttccatgcacttgatgcagtacggccacaagttgatggaggaaacggactacttccagaacctcgacaaggacgataccgcaatgagtgatcaggtcacccgtcagctggatgccatgaccaacctccgggctttgatagcttatggagaactggagggagcaaatccgcaaaaagccaaagaaaagaagccgttcaacggatggaaggtcaagatagattttgaagccaagaccttaaaaggaaaaccgtatcactctgaatactggttcatcctcgataaggaggcggaaattgtagtcaaatcatttgaaataccgctgctatgaaactgagaaacttgaaacatttactgtgcgctatactcacaggaggaaccatgttatttacctcctgcgaagaatgtaaccatgaaggagacaggtctatcgcttcttccctccaggttggtgatgtagtctgctcggatggcagcgtattgtctaaagagaagttctcttcctcgaaaaaggaaccggtggccattgtctatcatgtgaaccggaatccggagatcaaagctttgggctatgccgtttctatcagggacgtcgcatcggcagcctttgccgatagtctgggtgtcgaacaggaaacgtcagcttcattggagaaggaagacggtaacgagaacacccatgccatgtaccgccacgaggaagtgaaatctcccttagccgtttatgtcttcgacatgtggcgctatggccagtccgcctacatcccttcggtgaagcagctcacttacctctatcagcaaattgggtttatcaaccaacggattgaagcggtcggtggtttacctctcagtctgcagcccgatgactgctggctgtggacttccaccgaagtggagggacaaagggacagcaaggcctggctcttctcgatgcagtcgggaaccattcaggaaactccgaaggaccaggcgcataagttcagacccgtgataagtatctattaggtaatgtaacctctaaatgtaaagattatgaatgaattactcgtacaactccaaatgaagatggaggcattccaaaaggatgcagcccttcaagccgaaaaaggaaacaaggcagccggccagcgtgcccgctgtgtatcacttgaaatggaaccgctgctgaagcagttcaggaaactttcgttggcggcttcgaaaagataaaatcaaaaactttacgtggttgccattcatcggcaatgaaaaaacaagaggtcctgatgccatttatccatgcgcatcaggactttttttgttgcatcagtaaaccatgcctttctgtctcatttcttcccgaatcagttctgcttcggtatgggtcagctggggaagctgtacctgtttcggactctcttgctggtaagccttcacttcgttgatgagcatttgccagtcgtaaaggaactcctgactacagccgtgtttctgataaatctttttggcggcttccagtatctctccggcacagctgtcattcccctggaatacaactgccggaatctcgttgtggaagcaatctctcaataagcgtatctgatctttcatttgtgtaaggtaataaaatctgttttatatcgtgcctttctgaacatttattttcagggcctgcaaagatagtgagttttcggatagattaaaagttaaacattcatctttaacagctggcggattctttccttagtcaggcatttccactcccgatgaattttccgatacaaagaaacgaagggtcggtacggcagcaaatggcgctttgcttggctgcaaggaaagcagccggcagccttccacaatttgtgccaaattgggtattccgtctgctttccccttgccacatttgccttctgtcccttgcacccttcgtaagaagaggcatcgtaaaaatcacccgggagtgagaagccgaaaggcttcaaaccaaagggaaaaaaatagttcagctatggcatacaaacttaaagaccgaaaagaaaagatgctctacaagggcagtgtttacgaacttaccctgcagtgggacagagagagtctccgcaagtgcttttgcggtatgcctcctttctatgcacacatccggaaggacggcaacaacttcgcgctcattgactgctattccaccggggacgatttcagtgtggaacccatgcacccgctttttgaagagccggaatggatagttcacttcctaaagtcggacatcaactccattccactaaagaaactgctggaactgcttcccatctaattcacggagtaacgaacttaaaaagaaaacgctatggacacacttattgaagccatcccgacatgggcactctgctatctgttcaactcagatgcaaccggactgacggacgaagaaatcgctcagattgaccagtggtacacggagaacaagggtatgggtatcactaccgcaacggaacaagagggagagtgtttcccttacttctcacactatccggctttcggtcttcctgccgaagtggtggactgccacgttatggtaggctgattgccgagagcattagaataatcaacatcttttacgcttaaacataggaacatatgaaaggaactgaccatttcaaggaactcatccaaaactatcttgataaccgagccaaggaagatgaactcttccgtgccaagtatgaaaccaccacacgcaccattgacgatgtggtcaactatatcttccatgccgtacagcaatccggctgctgcggtttcagcgacatggaggtttatgccatggcagtccatgcgatagatgaacccgatttggaaatcggcaagccgatggactgcaatgtggtggtgaatcatcacatcgaactgaccgaggaggagaaggcagaacagcgagccatcgccctcaaacgataccaggaggaggaaatgcggaaattgcagcaacgcaacagccgacccaaggcagccaaaccgcaacccaaacccattcaagaactctcactctttcaaggcatggaactatgaaggcaagaacgaaaatagaaaaacaggtggcagcttccaatgagaagctgaccgccctaagccccaaagtgctcacatgggcagtgcggaaagtggcaggacatgtctgcttccgtacttccgcacacaagtgtacctgtggcgattgtggcagacacttcgactatgagggaaaaggcaagtcggtctgctgttctcattgcggtactcgcttacagataaaggacaccctcaaacgcaccctcaaggaagcctgctacttttcttccctcgaagtaatagaccatttgcaggtgcaacgggtcttccgcttggaaacgaccttccgcaaaggaatgcctatggaggtagactactgggaggcatgccgtctgtggctcaatgccgaaggcaagttagctgtcacagcaagagcaaggacattgggttattatgtggactgctttgattgggcatccgaaatcaccttgaagcgaccgaccgaagtccattggctcattgcagacacctatgtttatccgcactatcggctgctacccgaattgaaacgcaacggcatgaaaggcaagctgcccgactgccacccgatgaaactgatgaaagccgtactgacggacagccggatggaaaccatcctcaagtcaaaagatttacatgtcgtgtcttactttgtacaccgacctttggaacttgaccgatgctggcagtcgtataaggtagccacccggcatcactaccgcccttcggacatgggattgtgggcagacaccatccgcttgctggagcagtgtggcaaggacatctgcaaccccaggtatatctgtccgcagaacctcagagccgagcatgactattggatgaaccgacacaaccaaatggagcagaaacgcagaagccaggagcagatgcagcgagccaaacggaaggaagccgagttctacaaggagaagtcacgctacttcggcataaccatcaccgacaaagacctggtgatttcggtacttgatacgttggaagccttccaagccgagggaaatgccctgcatcattgtgtcttccaatgcgaatactatgccaaggcggacagcttgatactatcggctcatgataaggaaggaaaccgcatcgagacgattgagttttctttgacagaggggaaagtgatacagagccgtgggctgtgtaatacgaatactccgcaccacgaccggattgtccggctggtcaatgcccatgcccatcagatactcgcagccaaacagacagcgtaaattccttatatatgttccgctccgacttccgccgtgaggtgtgggtcggagtttttatattttggatagtagaaatagctgactatattaaaatgaaatctaatgcaaatatctatttgttatataatagaatttacatgataatatgtttaattacgcattgaagttaagtgggtaaatctatattttattccctttgaaaaaaaacgatgtaaatatgtgatatacaacatataaatagcgtattgtttttaataaaatataggtaaactaattatgtaataataaaataatatagtatatttgtagtataataatatagtagtaaagtaatatagtaaacctataaaaatggaagtaaaaaatataacaatagccatcggcaatcagaaaggtggagtcggcaaaactacttctaccgcatgtataggtgcagcacttgccctgagaggaaaacgggtgctgctcgttgacctggatgcacagcagaatctcacgttcacgctgacgcagaacgaagacccggaaacaagcatctatgatacgctggtcaaagaccaaccgctgcctatcgtacccatccgtgaaaacctggaccttgttccagcatcactggacttggcaagagccgaaatagacatggctaccatgatggcaagggagggcattctcaaatcctacctcgatgaacagaaggagaagtatgactacatcttgatggactgttcgccctcactcggtatcgtgacaaccaatgcgctggtggcagcggacaaactctacataccgctcactgctgaagccttgcccttgaaaggcttgaccatgctggatgatatagttcgggaagtgaaacgcagggtaaacccaatgcttgaattaggcggtgttttcttcaccaggttcaataaccggaagttgaacagggaagtgatttccatggtggaaaaacgatatggagagaaggtttttcagacgaaaatccgggagaatatatccatagccgaaatgccgctgtctggtcagaccatctttgagtacgaaccgaaaagtaatggtgcagcagactatcagacactgaccgatgagattatcagtcgggaggaaaatagataaactatcttactatatgactaatcacaaaaattattggtaacatagtaagttaatcagcaagtaaacaagtaataaaatacacaatatgagtaagaagaatttatccttattgatggatggcttcatgggtgaagccaatcaagcagaatcggtgcaggaacagcctaaggaacaagctactgaacaagcagaacaactaacagttctaaccgataagcaggaaagtccgaaggcggtatcttcaaagacagctactaaaaaggacgctaatgaaacagaaactaccgaaaaaatgaaatccagactggaagccaaacgcagggaaaatgtgggtcgccccaagaaaggcgaaacagccaaaagtgccaagaaaccccaggaaatccgagccacctttatcgtagatccggatttacttcaaaaggtgaagtacatttctcttgtggaaggtgccttattgaaggacgttatctctgaagctctgaacaactatgtggataaatgggaaactgacaaccggaaaatacgcctgcccaagaggaagtaagcacttctgagaatagggactatatctgttcaaacaggaaaaacaaccctgcagttgtgctttctcagtgaaaaatactatctttgtaggcagaaggcaactgcctacaaaaataggaaacgatgcgaaatacgtctaagataatcaagggaacagccatttccgctaaaaatgtaacagcaacagttgagcaaggtgaaaaaccttggtttgtccattcaaaaatggtcgctaatatcatgtattcaagaatgaaggaacagggaattacccaaaaggaactggcggaaaagatgaactgtacccaacagtatatctccaaaatccttaggggacgggagaatctctccctggaagctctctgtaaaatagagttggctttgggcatccggattttgcagtttgattccaacaactaacccttattgtttaaaataaagaatatcagtatatgccgttacaaagtgaagtagcgctcgaaaatggacttattgctactcttcagcaaatgagctatgaatatgttcagattgatgaagagaaaaacttgtattccaatttcaagagacagcttgaaaagcacaataaaaaaagactggaggatttcggacgttctgcctttacagaggcagagtttgaaaagattctgatttacctggagggaggtacccgttttgagaaagccaagaaactacgcgacctatatccgctcgaactggaaagcggtgaacgggtgtgggtggagtttctgaaccgtacccactggtgccagaacgagtttcaggtctccaatcagattacagtggaaggaagaaaaaagtgccgctatgatgtaacgatactcatcaatggcttgcccttggttcaaatcgaactgaaacgcagaggggtggaactcaaacaggcatacaaccagattcagcgttaccacaagacttctttccatggtctgtttgactacatccagcttttcgtcatatccaatggagtgaatacccgctattttgccaacaatccgaacagcggctataagtttaccttcaactggacggatgctgccaatgtgcctttcaatgatttggagaagtttgcaacccttttctttgacaagtgtaccctgggaaaaatcatcggcaagtacattgtgctgcatgagggggataaatgcctgatggtgcttcgcccctaccagttttatgcggttgagaagattttggaccgtgtggtcaactctaatgacaatggctatatctggcacacgaccggcgcaggcaagacgctgacttccttcaaggctgcacagctggtttctgaactggatgatgtggacaaggtgatgtttgtggttgaccgccatgaccttgacacgcagacgcaagcggagtatgaagcattcgaaccgggagcggtggacagtacggacaatacggacgaactggtgaaacgcttgcacagtaactccaaaattatcattaccaccatccaaaagctgaatgctgctgtcagcaagcagtggtacagtagccgtatcgaggaaatccgtcattcacgcattgtcatgatcttcgatgaatgtcatcgaagccatttcggtgactgtcacaagaatatcatcaagttctttgataacacgcagctgttcggctttacaggtacgcctatcttcgtggagaacaacgtggatggacataccaccaaggaaatattcggcaactgtctgcataagtatctgattaaggatgccattgccgatgagaatgtacttggcttcctggtggagtattatcacggcaatgaggacgtggataatgccgacaacgaccgcatgacggaaatcgccaaatttatccttaataatttcaataagtcaacatttgacggagagtttgatgcgctatttgctgtgcaatcagtacccatgcttatccgttactataagatattcaagagtctcaatccgaaaattcgtatcggagcagtctttacctatgcagcaaacagcagtcaggacgatgcacttaccggcatgaacaccggaagctatgtgagcgagagtaccggagaagcagatgaactgcaggctatcatggatgactacaacgaaatgtatggaaccagtttcactactgaaaacttccgtgcctattatgacgacatcaacctccgcatgaagaaaaagaaagcggatatgaagccgcttgacctttgtctggtaatcggtatgttcctcacggggtttgacagcaagaaactcaatacgctgtatgtggacaagaacatggagttccatgggctgctgcaggctttcagccggaccaaccgcgtgctgaatgagaaaaagcggttcggcaaggtggtttgtttccgggatttgaagagcaacgtggatgcttccatcaaacttttcagcaacggcaacaacctggaagacattgtgcgccctccctttgaggaggtgaagaaacggtatcaggaactgactgccgattttctgcgactttatcccacgccaagcaccattgatttgctgcaaagcgagaaggacaagaaagactttgtccttgccttccgtgacatcatcaagaagcatgctgagattcagatttatgatgaatttgaggaagatgcccccgatcttggaatgaccgaacagcagtttatggatttccgtagcaaatacctcgacatctacgagacctttgctgcaggcggaaaacaggaaaagccaaaggaatatcaaatgcccgaggaagaagcaagtgtggtttgcgaagatgaccctctggcaacaccggacaccgggttggaagatatagacttctgtctggagcttctgcacagcgacatcatcaatgtagcctatatcctggaactcattactgatctgaacccctacagtacggattatccggaacgccgccagcaaatcatcgatacgatgataaaggatgccgaactccgcagcaaagccaagctgattgacggattcattcagaagaatgtggatgatgaccgggacagtttcatggcgcgtaagaaaaaggcagacggtacgagcgacctggaagaaaggttgaatgactatatcaccacggaacgcacgaatgccatcaaccggcttgcagaagaagagaaactagattcagccgttctcaaccattacctttcggaatatgactatctgcagaaggaaaaacccgaaattattcaggaggctttaaaagaaaaacatctggggttaatcaaaagacgtaagaccttggcaagaatactcgacaagttgcggagtattatccgcaccttcagttgggaataatatagtaaacaattagaaaaaaacagatatgagcgaagaattgcaacagaaactccgtgatcagctttgggaagtagccaataagctgcgcggtaatatgtcagccagtgactttatgtatttcaccttgggattcatcttctataagtacctttccgagaaaatagaaaagcatgccaatgatgcgttggcagaggatgaagtttctttcaaggaactgtgggcaatggagaaagatgaagatgtggaagaactccaggaaggtgtgaaaacggaatgtctggagaatatcggatattttattgagcctgacttcctcttttcttcagtcattgaaagcatcaagaagaaggagaatatccttcccatgctggagcgttccctgaagcggattgaagacagtacactcggacaggacagcgaagaggattttggcggactattctcggatatagacttggcttcaccgaagctgggtaaaacagccgacgacaagaatacactagtcagcaatgtgcttctggctctcgatgacatcgattttggcgtggaagcatcgcaagagattgatattctcggtgatgcttatgaatatatgattagtcagtttgctgccggtgcgggaaagaaagccggtgagttctacacaccccaggaagtcagccgcattttggctgagattgtcaccattggtcatacccgtctgcgtaatgtgtatgacccaacttgtggcagtggttcattgttgcttcgtgcggcaagcatcggcaaagccaatgagattttcggtcaggagaaaaatcccacaacctacaacctggctcgtatgaacatgcttttgcacggtatcaaattcagcaacttccgtatcgaaaacggagatacgctggaagcggatgcttttggtgacacgcagtttgacgctgtagtggcaaatcctcctttctctgcagaatggagtgctgccgacaagttcaacaacgacgaccgtttcagtaaagccggacgacttgctccacgcaaaacggccgactatgctttcattctccacatgatttaccacctgaacgaagggggaacaatggcttgtgtggctcctcacggagtgctcttccgtggaaatgctgaaggagtgatccgccgcttcctcattgaaaagaaaaactatgtggatgccatcatcggtctgcctgccaacatattctatggcaccagtattcctacctgcatcctggtattcaagaagtgccgcaaggaaaatgacaacattctgttcattgatgccagcaaggaatttgaaaaggtaaaaacgcaaaacaagctcagagagcagcacatccggaaaattgtggacacataccgtgaacgcaaggaaatagagaaatacagccacttggcttctctcgaagaggttgcagaaaatgactacaatctcaatattccccgatacgtagatacgtttgaggaggaagaaccgattgacatccacgctgtcatgaaggaaatcaaggagttggaagccaaacgtgcagacctcgacaaagagattgagggctatctgagagaattaggattggtagaataagtgtacaatgacagaaaaagacaatatcccggaaatgcgttcttcctttgatgacctccgtcgtcaggatgaaaacggaaatatatattggagttcacgtgatctttctgctgcaatgggctactctgcctattggaaatttcaaaaagtcatcgacaaggcgattcgtgcagcaggtgaaaagggtatgaatgtggacgagcatttcaaccaggcggttgatatggttaagataggcagcggctcatttcgtaaggtttctattttccgcctttcgaagatggcatgcatgattgttgcagaaaatgcggataccaaaaagctattggtgcaacaggcaagagcatacttttctgagacattacccatcaacgaattgatgcagaatgcgctgacatccaatattctgctgtataaaacagcacagggagagagtcgcattgaagtgatattcaatagcgagactttttggatgtcacaaaaacgtatggcagaacttttcggtgtagatgtgcgaaccatcaactatcatttgagccaaatctatgaaaccggagaactgtccaaagaagcaactatccgaaaaattgggatagttcaatctgaaggtgagcgggaagtggagcgtactccgtttttttataacctggatgccattattgcagttggctatcgggttaacagctaccaagccacccagtttcgcatctgggcaacctctgtcttaaaggaatttgttatcaaaggatatgcactcgacgacgaacgtctaaagcaaggtaaacatttcggcaaggattattttgatgacttgctggaacgcattcgcgaaatacgtacgtcggaacgcagatactaccagaagattactgatatttatgccgaatgcagtgccgactatgacccgaagtccgaatgtaccaaattgttctttaagatggtacagaatatgatgcatctggcagtagttcatcgcacagcggcagaaatagtttatgaacgggcagatgctgaaatgcctcacatggggctgaccacttggaagaaagcgcccgatggcagagttcagaagtctgatacgattgtggcaaaaaactacttgtcagacaaagaggtttctgagctcaatagcataacgattgcattccttgaatttgctgaacttcgtgccaaacgccacatcttaaccaatatggcagattggaaacaacgccttgagcaattcttgtcctctatggactataacgtacaagatacagcaggcaaagtttctcaagaagcggcgcgtgaaaaagcatatagcgagtacgagaaattcaagctcatacaagaccgttcgtttatctccgatttcgaccgatataatgacggaaacgaattattaccatttgatattaaccctgataaagattgacagttacaactatggctaataataaaaatacaaaagtccctaatgtcccaaattcaacagataaaggaaatacaatccgtaatgttccccttttgagatttccagagtttacggaggaatggaaggagcattgtttagctgaatatttggatttcaagaacggattaaatcccagtgctaacaaatttggtagtggtataaagttcatatctgttatggatattctgaataacaactttattacttatgattgcatcaggacttctgtgaaaataacaccagaggaacaagtggcatttgctgttgaaaagggtgatatgttgtttcaacgaagctccgaaaccttggaagatgttggtagagcaaatgtctatatggacgaaaatccagcggtatttggaggtttcgttatacgaggaaaaaagaaaacggaatacaatcctatgttctttcggtatctgttggcaagtccctatgcccggaaaaagattattcctatgggtgcaggagcgcaacattttaatatcggacaagacaagacggattgagtaaagtaaaacttcattttcctatactgcaagagcaacagaaaatagctgctttattacggttgatagatgaacgcatcaccacccaaaacaaaatcattgaggatttgaataagctaaagtctgcgattattgaaaaacttttttgcagtccaaaagataagcaaccggaagtaaggttacatggtttttccgagaattggcaaattatatgtctttccgaaatttgccatagaattcgttgtaaaaacacagaagagcaatgtaagcgagttttgacgatagcagctcaatatgggcttgtaagtcaagaagaatttttcaacaagaatgttgctagtgaaaatttgtcaggatattatcttttacaaaatggagattttgcttataataaaagttattcaggcgattatgtttgggggacggtaaaacgcttggacaattatgaacaaggtgtattatctcctttatatatttgtttccgcccagattctgctaaagtggattctgattttctcgtctattattttgagtcaaagaaatggcataaagctgttgcagatatagcaggtgagggtgcaagaaatcatggtttgcttaatatctctgttatagattactttaataccattcattgtattccatctgtggatgaacagaaacaaatagctcagatcatgagcgcattgttatcaaagttagcacgagaacagcgcatattgaattgttacactacacaacggcaatacctacttcgtcagatgtttatatgaacatctgacgaagtaaatacgctttttgtttatcgagcaattgaagataggatttctcaactcttatcttttcatctaatgaaattaaacagttggccatcttattttgttcttccaaagaaggcaacaatagtttggcattttcaatatcagtataatgtaaatgaattatggtgctgccctttgcaaattttgccaattgtctgttggcgatatgattgaaatagtaacttaaatattgggcattaaagttagtgctgatgtgaattccaaacatatcaccacccaatataaccccatctacgttaataacagatggagcaattaaggatattgcatcaactgttgttgaagtaggaaacaacaaatccccttttttactcaatgtcatgctttcttttttgttggtatggctttctacttgggatatggtttctccataggttgtaaacagttctccataaataatacagggcttaccagtttcggataaatcatcctttgacaaattaccaacattgaaaggtttacccaaatctgcaacacaagcattctgtttttgagtatgtttataatgctcttcaataatcgcagacctataagccggacaatccttaatcaggggaataaatgactctttatatgctcaatatggtaatgaggtcaaaacctcttttgcaaatctcggctcttcgtactctggtttatcgggtaaatcagcacaagactttggttctggaaaaccattcataacttacttgaatgtgtattctaacaatgtcatcaatgaaaaagatttccaatttgtggcaatcaaagataatgagaaacagaatgttgttgaatatggtgatgtattattcacgctgtcatcggaaacacctgaagaagttggtataggttctgtatatcttggtaaggaaaaagtctatctgaatagcttttgttttggtatccatattacaaatacagaagtggtttattctccatatttatcttactatgtatcttcaactccttttcgtaaatttatctatccttatgcacaaggaagcacaaggttcaacctttgtaaggcagactttgaaaaggcaagtatcaaactgccctctttggaaaaccaaaaacgaatatattccatattgagtcatatagaaagtaaaacagaaacagagaagagtctgcttgacttatataattctcaaaagcagtatctgctccgccagatgcttatataaacatctgacgaagcaagtattgcttctgcaaactaagattggttaaaattctctgttctactgatagtttgttatctattgctgacagtaattccacatatttgagttgttccgtatatgatgggcaaaatattttggctttgccataatccttgaaatatatgtgaggtatagccatgcctgttttataaggttcaaagttgaatacttttagcatatagtataggtattgaagcaaatagccatctttagcttgtaaagtgttcaatgtccctgttgcagaacacttgcctgtaacataagagactgttcctacacccgaaccatctttaataatgtggacagcttcatcttctgtactataatcatcgaaatagccaacgatgccatttgcaccgtatacaggataggttccattttcacagatatcactttcttgcagagtggatgaactacattctaagcattctgataaaagaacatttggttggttgttgcgagcaatattctgtgcaattcccctgattaaggactcatatctctcaatgattttgttttgagtagcaatgcgctcgtcaagaagtgacaggagtctggctattttctcctgttcttccatacatggattataggtgttcacaccttttaaatgctcagcatatagatgtacaactgatactccttgtgcaacttttgcaatatcatattttcgtttaccatttaattgataactcatgaaagaaccactatgcttatgcaaacgaataatgttaaggtctccacctaagaggatattatttttaagaacacagcgagccgttgctatatcttctgccgtttcgccagagctaggaatgataacatcattagcttgacttcttactaattttgtactatctatatcagttttactgatgatgtcatagataacctcagatttatactttgtataaagttcaccatataaaatgcaaggttcgcctttttccgataattgctcttttgatattccagctcctttgctgaaatcggctgtatctcctagttgctctttcttccactctccttcaaactccgggaatctcaaagctggaacattacggataacatttcctctatctgttgaatttgggacgttagagtttgtttttctctaatttatagagtacaaccctataattaaggattatatgacaacaaaaacaattagagaaattgcgttagcttggaagagtgataagcaacgttatgtaaagcagtcaacttatgctgcttacgtgttaattctagagaaccatctattaccatcatttggtgattatgaatctctcagtgaaaaactggtacaagagttcgtcctgcaaaaattggagaatggactcagtgtaaaaacggttaaggacatactcatcgttctcaaaatggtaatgaaattcggtgtgaaaaatgaatggatgaactattgcgaatgggatatcaaatacccgacatctgaaaccaataaagatttggaagtgctgactatagctcaccataagaagatccttgatttcatcaaagagaattttacgtttcgcaatctcggtatttatatcagcttgactaccgggctacgtatcggtgaaatctgtgggttaaaatggtcggatatagatgtttgcaacgaaacgataaccgtaagacgtacgattgaacgcatctatatggttgaaggcgattgcaagcataccgaactggtaatcaatacacctaaaacaaaaaattcttgcagggaaattccgatgaataaggaattattggctatggttaaaccactaaagaaagtcgtaaacaacgagttctatgtagtgacaaatgaagagaaaccaacagagcctagaacttatcgtaattattatcaccgtttgatgaagcgtttggagatacctcgtttaaaataccatggattgcgacacagctttgctacccgttgtattgaaagtaactgtgactataaaacggtcagcgtattactcggccatgccaacataacgacaactcttaatctgtacgtacaccctaatatggaacaaaagaagcgctgcatcaccaagatgcttaaatccctcagaaaatgattttcttttgacggcaaataacctactacagattttcaaaataggtaaactatattatttgtaataaggtaataaagaagacaagtcatattgcaatctgtatgtattataatagatccggtttgctccgtatttgcaataccaagcaaagcccggctgataggattttgctacaagtagaagttccattccattgccacagagagaagcagcagggtttcacttcgctccactcagctgtttctcacagtgtcaatgaggttggaaaacatatctgcaaatgatgacttgctcgatggctctaccgaacgcaggctgacgcttgcggaagtagagccatcgaatggtttatacagttagctcacagatgttggtcaccacttccgactattcgtatttcatacaatgccggaagtgacgaccttttggggaggatgcgccatccggtttgctccgtgtctgcaacaccaagcaaagctcggctgagtggctttggctgcgaatggaactccaatccgttgccatagagagaacctgcaaggctccacttcgcttcactttgtaggttctcacaacggcaacggttttcggggatgtgcatcttcaagacggtcgggatgctgggttacgcggactttctaaggaatatgtttgagatgacctgttagaactaattctttcccttggagtcctaatcgggaaagtcttgaaaacctttggaacttcttggtccaactcgttttatccgtgcaaaggtactgcggacgggagaaacgtcaagtgccgctgacgctttcggactgaggactttccggtagccttccacaatttgtgccaaattgggtattccgtaaagtcctcggacctcacacttgccttattctccctgttgtccgcagtgaggaactgcacgaaaaacggttttcccgaccaagaagctctaaagggcttcacaagagggagaagaatcggaatcgcaaccatctaaattgttttgactatggattatcccgaattatccggagctaccatctccgaacgtgacaaggcttttgcacaagagtttgccaactttgtaaatggcagtatgtgttcacctgaccagactggcagggaactgaccaaagctcaccgctacctgcaacagcagatgttcaaggtgttcctcggcttcatgaagcagctggcatacaactatcagcagggaagatacgatgaccgcaacgagtgggcatcacggctgtccactgaagcctatcaacggctcattgagtgtgacttgatttttgaccccgaatttccaacctctaaatgacaggactatggacgaatatgactttcccgaatacggcagacaatgcgagttgataaccccttggcgaggctaccaccgaggaactatcgtagccctctctgaacatggttttgtggttcagttcagcagtggtgcagaaatagatgtttataaagacgaaataattttggattgatatgtgcagacttatgacaacgcagttggaggaagccttgaaaggctttcctctctattcccaagacggcaagggaaaggacgctatttgccgtgccatctttgcgctcggtggtgtgcggtggttcatccttgaaggtgaaaaagaaggaaacgacactatccttttcggtatcgtcatcggactgatggaggacgagtacggctacatttccttgaatgaactttcggacattgagttggatttgaccaaacaaggcttcggcaagctgcaagtaaggcagcaggaaaacttccatccggtgccactgaaaaagttgcgtgacagccggctgcaggagttccttgcaagaatgggttattgaacgtatgatttgtaacaagaaagtgacctgccatatccatcacggacttggcaggtctgtatgtagctttatgtcttatgagaaataaaaatgtattcagcattgcagccttgcttggctggactgtttctgtaaagtatgtagatggcagtcttttctttgacttccatcggaaaaccttgagcggtgttccgttttccttcaccgctgaaatgaaagatagaaagttggagaaccttatcaaggagattgaatcctttgtggatgccattgaccctgagacttgtgccggggaatggatgattcagtcaggtgctatggctccttcccggtatcagcaggcggtaaacgacatggatgccatccggactgatgcgtggctactggcttgcgaactgagggaagctgacggaaagtcattgctggcaggcttgccctggaaccaatggaactgaccccacattctactactattcaaagacagccttctaccgagatgtgctgtctttgaatttgcgccctttcttggggagacctgccgctttataggcaagcaggtcgcttccctggaatacgatgcctcttttatcggtatggatccggataaaaggaagcggacgttcctcatgtctgatgtagtcatagatggtacaccggtggatgccgaggaagatacaggcttccttcacggaatatcttttttccgggagtatcacaatcgtttgtatttgctgtatatagttcataagtattcttttgggtgtaaagttactcatgcaggtccattcttacaataggtaaaatctttgataatgagggatattgtgatgttttgaaagactttgtattactcattacttgttgcccaggtgagttcggtctttcctgaatgatttatatgggaatgacttgcgatttctgtttatgggatgtataagttcagaaacaggattggtatagacggtgacagttctattttgtcatctctgcctgcgaggatatttttttgcaaaggtattgctgtcatcaccaaacgtcaaatcccttgcagaaaatcttcctcaaacaagttgagcgtattttctgccctgaatttgccttattgggctgccagcactctgataaaagcaaaaaatatcccttcggacaagctgaaaaacagcaaaacagaagggaaaaaaatcagagcgtatggcacagattgacaataacctcaagaagcagttggcaaaacctcagacatggttctgcaagtattttcccaagcgtattcgcaacgtcggtgaaaaggaaatttccgacagacagatggtgtacgatttcaaagacggaagaagctttgaagcggtagcgcaaatgaccgcagcaaacatgcaggaacaatacggcgaatcctgcaagaatattgttttcgttcaagttccggcatccacaagttcaaagaacgaactccgttacaaggctttttgtgaaagggtttgtgaactgaccggagctatcaacggctatgagcatgtaagggtaatcggcggacggcttgccattcatgaaaaccggaagatggaaaaggaaatccgcaaagtgcatatcatcgattttgatgaagattggttcagtggaaaatccgtagtgacatttgatgatgttatcactcgcggcatcacatgggctacctatgctgaccagttggagaatttgggcgcacatgttatcgggggcatcttcctggctaaaactcactataaagtaagcagacaatgaaacaaagatttacgataaaggaggcttccatagcctttacagggcatcggaatattgcacccgaacagaaagataaggtgagagaacggctcagaaaggccgtttctcttgcttataaggaaggaaagtaccaatgtatctgtgggatggctttgggtttcgacatgctcgcagcggaggaagttctttccctcaaagctcgtcttccttatctgcaactgatagctgttgtgccgttcagaggacaaaacagccgttgggacttggcagaacagcaacgatatgaccatatacttgccaaggcagacaaggtgattgtgttgagtgatacctattataaaggatgtctgctcagacgaaatgacttcatgctgcagcattcaaactttgtgattgcctattatgacggaaaacagaaaggagggacttattatacttgccgtgaggctcggaagagggggatgactgtcgtcaatctcttttgatgccaaacattttgctgattccgacaaaaaccgctaaaaacattttgctgatttcgacattttgcgtttttgggagagagcctaaattaaaactaagtccactgaaatacttataaatgaaagttttgatggatttttctgtttgcctgcatacatgacgggattgttttagatgaagacccatgagtctgctcacgggttatttatagatgacacaaagcggaatccttatctgaaaaccaaagatagaatttcgctttgtgtctattttctgaaaacagacttggactggtgtggtgggagtccaagtctgttggtcgtttcagagggtgcataggacatgccagcaatcaatgatggattgtccggaatacttaggccgatagacattgcccggattcagcggcttgatatagccgctttccctgtatttccggagtgtcttgtagcttatgcccagctcggcgcatacacgtttgacggaatagaccccgttcgggtcgcatgtaggtttcatttctctcataagcattaaattgttagattgactattcccaatggcggaagcatcaaggctggtagttgttcgaactgtcctgattcagcataccgttcgttttcatgtagctgatatagcttttggctgtcctttccttgatgtccatcgcctgcatcagttcggttacgagttcagtgtacgtgattttcttccggcttcggaagatttcttttatgataccctgcaactcctcctttttccgtttctccttgtcttcggccggcttttcaccggcagatacgtgcatatctttctgtttgtcccatgtgaaaagcagcatgggtacatccaacggactgccgtcacggactttgattgccttgactacggaatagacaggattctcatccttctcaatggagaggatggctgccgcttttctctgcagctccgagccgatgtgcccgcgcagttttattccgttgggcacaaaatgcagcacacagatgatacaggttttgtagatgccggccaggcggtacacttcatccacaatggcaatgctttccgcttcatcattggccgaacggataaggtctgcaatgccatccagtacaacgaggtggattcctccgtgccggtggtaatacaaatccatgctgtcacggatcatgctgatacgctcctttcttgacataggggccagatagaacgtatggtaaaaatccggtggtgcaggtaatccgatacgtttgattgtcttgctcagattcttgaataactgaaactcagactgctcggtatcatagtgcaacacggccttatcagagtagtttggtgaaacttcaaagccaagcgtatcgatgttttgtgtgtcgtcagcaagtgtacctgcaatcagggctgatacgaaattgctttttccggtaccttcaccacctgttatacatagaaggttgtcgtaggtcccaagcggtactccgttgacggaaaccactgttttggaagattcgggaggattgttgtagtccatttcgcaagattttaaaagcatcatagtttgtgagtaaagcttctccagcatggaggtaatcagtacctgaaagtccgctgcactttttccggaagcaaagtaatcggaaatatccttttctccctttgctccggatataggcagttccattctgagtacatgaaacgaggacagttcatccatgcgtctggcagattcgttccggcctgtatcgtccatatcgtacagaaagacaatatgacggaacttacggtcaaacatctcaatcagtgaagtgggtatggcggccgtttcactgttgaaacaaacggcattgaatcctttggaggcaagtgacattacatccttttctcctccggtgataaagaccatgtcccccttgttgggtagctgttccagaccgaaacagtatacctcaggcatctctcctccataaaagaaccgcatattctgatttcgaggccggtaaaccttggtaaatcccatgcccatgtaagcaaacatgggttctgttgcagatgaactgattttataaattttattggaacggttgtagccttcgaatgactttaaggaatgtacattgtatctttccaaagtatccggcttgattccatattgctgccagtatgcaagttcagcaactgaaaagggtttaacctctgtatggtaatccttccttattggattgtcattgtcattcatgatgatacgtttttctactgcctttttacgagcaggcatatcgttgtttcctgtgtggactatggtgatgttcaggtccgatacaatacggttaatgatagcgacaaagtctcttttcacgtccaatccgtaaagcatgccgacgaaccagaagcagtctcccgaatattcgttatttccgaaatccttcatcttgaacacttgggcatgccggtcataatagatattgcatgaagcaatccggtcttcgtagagcggattcctgaaattttttccgggtcgcaccggaaagttgatgtaatgtttgaacacggcaagcccgcggcctgtgcgttccagtatatcttccttgtctatcatttggtttcagttgtgcatttgttcagaagaatcccgtctttataatcagacagtcgtttgagtgcttcctccttcgccatacccggaatttttatgcggaaacactttattgccatgaacagggaactgtatgaaaaacgtacaccaccggtttcggtatatctgaaactgatggaacctcctttccgccatctgtacagcgtagattctgagatacagaagatggtcatcaggtctttggtgcttatttccaaggcatcgtctatatcacgatacaactctgttgtacgctccacgtagctttcaatccggttgagctgttcaaccagtttttgaaaagcaatgctgtctatcgttatcacttccatactatttgttctttagattcttgatttgcaagttgtcttttcccaatatgtcaaggtattctttcagttgttgcgggctggaaacgttgatattgaggttgatccggcagtcttctttactgcgtctttcctctggggaaagtaaatcgtaccaattcatgtccaaagccttgcaaatgttgctgattacatcaaatcttgctttggttttaccggtctcaatctttgaaattacagaggtactaacacccactaaaccagctacatactcttgtgaaaaacctttcaattcacgttgctttcttagcattgttcctatattttccataaatataaagttagtagcttctaagcggagattatctttcccaaacaggcaaattcttgtttcttgggcacaaaacatttccgtagaagcaagttcaactaaaaattcagggaaataatataagagacataaaatcaataggaacagtagtgaattggcgtcaaaaagtgccattagcatcactataggagctaatggcactaatttaccttcaaccattgccgaataggagatagtcaataggtaaggtctgtataaactatattttgaaaagcataaatgtctcaagaaagccttttcacaaacatctacatgatttctttggcaaagccttccgaataatacagatattgtatggttccaaatgattcgccataatcgggaaatgactgatataagtttttggaagtaagatgttgtttgtgaatgtagtcattggtgcaatgccacacacagtctccgttagtgcaaggtgcaagcctatatatataaataggctcgcaccttgcactaaaaagtgtagcagtggagtggctgaaaatatttattataaagcatttggcaatgtgttcgttttttagtatctttgaaccgtgataaaatgatggcataggcattcaaaagggtttcaaaaagccttcagaaatgtgctacaattttgctacatttgttctttaccttgatgttataacgctgatatacagagaggataggctgacaagttcagaaacctgtctctccgctgaaacctaagacattaggtagtcaaattaagacaagtcccgtaaaatcaatgttttacgggactttttctatttagtcggcggacaaccgaaagacattgaaaagcctacttctgacaaggttccgttactaaatcgttactaaaaatcagcctatgaaaatagtaacgattttcgatgtaagtatctgatttgtcgctcattgacgttcaaatgtctacttgtaaccaaattatttgtttttcctttgcaacgggaagtcattacccccattgtatcggaactaaaaattaaaataggatatgagtaaaagtacatttaagattctgttctatcttagaaagaatcaggtaaacaaagacggaacggtttgcatcatgattcgtctgtctttgaacggtgaaatctcacagttcagttctaaattgaacatcaaaccggatacatggagacatgtacgtacggttcgggggcaggttagtggaaacttaccaccgcaaggtggcaaagcgctgctggcctagcctactgaaagagattgccgatgtgtgcggtattaaaaagaacttgacatttcaccttgcccggcacacgttcgcaacgactaccacgctgtcaaagggcgtacctattgaaacggtgtctaaaatgttgggacacacgaacattgaaacgacccaaatctatgcccgcatcactaacagcaagataggcagcgatatgcaggggcttgacaagaagtttgtcggcatcgaaaagatttacaaggaagtcgctatgtaatcttgattgttgggaactggtcacaatttgtgaccagtccttactattattccaacattactaaatcccctaaaatatacgtaagcattcagcaaaccccgtatttccccctctgaaagttcttcttagttttgcgtgaatttaaaacgtgaaacaatgaagaacttgacattagaagaatttaaaaagattcatgaagaatggaagtcaacgggactttccattcgtgactattgtcacaacaccggctttgaagaaagcaagttttattattggcgtaagaaacttacagaagccatgctgccgcaggcgggcggttttgttccggtgaacatgtttgaccaaaacggcaagctgggcatgtctgtcaccggctccgctaaagaagcaacggatcatgtaccctgtgaagtggtctatcccaatggtgtcgtcttgcgcatccagagtgaattgtctctggaagcgctccgttcgttaatcctcttatgtcggtagcccatgttcaacctcaatgattcaaaccgatttttcctgtacccgtatcctacggacatgcgcaaaagcttctattcgctgagcggcattgtgaccaacctcatgggcatgaacgttcaggacggtgatgcctatatctttatcaacaaatcattgaccgggttgaagattctccatgccgagtacggtggtctggttatctacaacatgaaacttgaacggggagccttcaaactccccgatattgacaccgatgaccctgccacttcaaagggtataaaatgggctgacctgatgatgatcgtacaagggatatccccttcggaagttcatcggtgcagtcgatgggagcccaagaaaaagtagtgttccaagtcgttttttatggtctgaaaatgaggtaaaatggtctgattttcgtatctttgcagtgtaagaaaagaacagaaaaccatgtcagaaacctccaaccagaaagccctcatcgagcagctgctcagcgaccgtgatgccgagttccggcgggcggtgaaagcggaacggcagctgaaggaattctcggacgtcaaaaggatgcaggccgactacgaagccagactggctgaaaaggagaaggccatccaggagcgcgaccgggctttggagtccaaggaaagccggatagcacaacttgaacagaaacttctttatctggagcgcaagatgtggggtgccatgtccgagaagcggcgtatccccgatgaccccaaccagctcaaactggactttgacctgctggaaatgaccccggaagaggaagagacggtccgcaaggctgtcgaggaggtgaatgaatacaggaaggtgacggtcaaggaacatgaaaaacgggttccggtccgtcagaaactgccggacaacctccgccgcgtggaagagcacatctatcctgacggctatctggggcatgaagacgaatggatcctgttcgaggatgccgaaacgtccgaacacctggaactccagcctgccgaactgtacgtccgggtgaccatccggcataaaggcatgcgcaaggagacgaaggaaatcgttacagcgcccgtacagaatgaacccattgccaagagctatgccagtgcatcgctgctgaccgacctgatggtcgggaagtatgtggaccatctccctttctaccgtcaggtacagatgttcaaacggttgggagtcagcatacccccttccacgatcgaagtctggttccacgatgtggccgacctgatgcggccagcctactaccggttgagggaactcgtcctgtccaccgattacatccagtccgatgaaacgacggttcccatcatcgacaacgagaagcaccggacggtaaaaggttacctgtggctggtacggagcatggtcaacagtctggtgttcttcgcctataatgaaggttcccggggagccaaggtggtcctgcagctcttcaaggattatcagggagccatacagacagacggctatgccggatacaacatcctggaaaaacaggaaggcataacgacattgggatgctgggtacatacccgaaggtactttgacagggctttaacccatgacaaggcgagggcggaatacgctttggcccagattggcatgctgtatgatgtggagagcatggcagacgaccagcatatggataccctccagcgcatggagctgaggaagcggcttgcctatcccatcatacgcgcttttgagaagtggtgtatctgtgagcagggaaatgtgcttccgaagagtcccataggaaaagccatcggctacttcctgaacaactctcgccggttggtgaggtatacgatggacggaaggtatctcccagacacgaacctgatagagaacagtgtgcgacccgtagctgtcggacgcaagaattatctcttctgcggcaatcacgacgctgctgaagatgctgccgtcatctactccctgatgggatgctgcaaggcagcagacgtggacttcaagcagtggatgaattattttctgaaccatgtccatgaatatgacagtgactactccaaggatctggtaaatctgttgccacactctttaaagaaacaaggtatcatttaagaatctcgtaaaaactaagagatgtctcgtaaaaatagggactttttaagagaaaagtcggaatttttaagaggcatctctttatgtttatagaccttgcaagacggggtttgctgaatgcttacaaatatacgattatggacttacagattatccaaaacaaaatttttgaagtaagaggttaccgggtaatgctcgattatcatttggcagaactctaccaagtggaaacacgagccttaaagcaggcggtcaagcgcaatatcgagcgttttccgggcgattttatgtttgtactttccaaagaagaagccaacttgctgttatccataggggtatcacaaaatgtgatacctcctgactacaactttggcgcagccttgcctatggctttcacagaacaaggcgtagccatgctttcttcggttctccgttccaaagtagccatagaagtaaacatttcaatcatgcgggctttcgtcctcatgcgccaaatggtaataggttacgaggagctgttaaggcgcattgaggaactggaggtaagcaccgatgcacagttcaacgaactgtaccaagcccttacccagcttctaagccagtcgaagcagcagaaagaacgccgtccggtaggtttcgttacctatgaccgtttaggtgacaaataggtaacgatttcggtagctaaacttctcatttatcgggtagctcaatcactacccgatatttttatactattttacaatcatcaatcatatactattcatacgtcaacctgttatttggattttatagccaatgtaaatgattccatatttcctaaaatttcagttttaatacttaatgagaaaatatcatcgctataattacaatcgttttttttagcgaaattatatatatcatccggtaaacttaatgaaagtattcttactatattgagtacagattcttgaaactttgatatggcataattccgttcttcaggagatagtattgatagtgataattctaatttatggatatataattcttctccttgtaatgatagtactaaattagataacccatctttttttataaggtaataattcgtaatactataaaattcatttaatccatcaagttttttccattcgctaaattcgcctaattgcaaatcagataatgctttgcagcaaccaccaatattattaaaaagtttaattttcattttattcgtaatagaagatttcatatataatggagcttgtgcagcttttttgaaataatctttataattagcagcatcttgatatgcaaggaatgctattttatgctttatacgattaattcgtttcagatttaaatgcccataatacagtatataaaatttgattttacatttttcatatttgtctttatctctaaatattacattaatagcaacaaacattatttcgtaattcatatataatgttaatccccagtagtaaggaataaataaaatcgttagaatcaaaggtaataagaactgttgggaaacgtcattccaattagttgtattaaattctataattgttttgtataatgcaaatcctaaataaactagcccgataataataagcaacttatttaggcatgaatgtgttttttggtaatctttgccattctctgtataatattcagaatatacgctaagtgcagttataaatgctacaacaggaagagctatcaattcagtaatcaaactaaatgaatatagatttatcatgaattgtacgatggctgtaactgcaatattacttttaattaagtcagtaaaataaccaaaatcttttattctatttaatgtaaaagcagtacctaatgcagaaaatatcagccatacaactgtatctttcaaaagaaatattccccaaatatttaataaataaagtagtataacaattatagatgcataaatagccaaagttgtatatataactaccaatttgagggtaaatgcagatattataattcttttcaaatggtatctccatctgttcttaattagaaaataaaccaataggataactaaccaaattagaaaagctaattccctatttgaaaaaacgcttaaaatagcactcatttttgcttaaaattatgtgtaatttcgtctaactgaccttttagtaattcctgaatatctatttggtcttgttttttaattttttcttccaaaggagaagaaaaaacacctgtataaaaagtatgattttttaggggatatccgcatctactaattaaataagtattggaaaaacttaaatctaaaatgttgtcacaaaaatgtaaattaaaaactaaaagtctattttctctaagagtttgagggaatccgtacgctattgcagagtaatcaattattatgggtatagcaaaagttccaactataaccacagaatctttggcttctacaaattcatacagataatttttagctaactgttctaaatagtgcttacttaaattaataggcttagtattgacaaatattggtttttcttgtatgctattgggcaaggttatacaaataccttgtaattctgaattgtcattatttaagttaaaagatagttcaagtgaatctatcttttcttttattgctggcgtatgaattatcatatctttactaattccatactcaaaactctgttttgatgtatagtaggataaatagctaataattagagctattacagatataattataggcaatactgccatgataaattttaatattttcttcataaactatttttttacaaagatacgaattatcaatcatttaatggattgaatagcctacaacttcgatttccagtgaatggatagtttgcatacttgtaattattatctttctccaactggcacattccccgaaacgccaaccgtgcgtggcatggctgactgtattccgtgaaaagagccgttggaaacccgcacaagcgtaccgcaaggtaaacttgccatacccttgcctttcccgcccgcatggagtgttccctaaaagacgaaagagaacaggcacttttccccagtttccttatctgtaaatcttcctcttacgcagtcccccaaccgggacagtcgtttttatcatttcaataggcaaaggtagttacgtgttcttcacgattttgcaaggtcgagccgttccggtttggcgaaaaaatcttccctgccttgcgaggtattttttgtccaaaaccttgcaaactctaaacactacccttttgagcctatgtgaaacgaaaacgaccgacccgaccggaagacgcataaaaaaaagtcagatttacgggaaacaggaaaaaagttcagtgaaacttcaactccctcacctcttgaatccgcataaaattaaaaacttaaaaattacagcaatatggaagcaaaggtattatcggaagcaaaagtttatgtaggcacttacggcaagtataacaacggttcattgtccggcgcatggcttgacctttcggactattcggacaaggaagaattttacgaagcctgccgggaacttcacaaggacgaggaagatgcggaatatatgtttcaggattacgagaatatcccggaagccctgatttccgaaagctggatttctgaaaacttcttttctttgcgtgatgcggtagaggatttgaacgacaccgaacaggaagcctttttcgtgtggtgcaactacaaaagccatgatttgagcgaggaagatgcggacgaccttatacgtgatttccgggacgagtatcggggtcaatatgacgatgaagaagatttcgcctatgaaatcatagaagaatgttacgacctgccggagttcgcaaagacctatttcgattatgaaaagttcgcccgtgacctgtttatgtgcgattactggtttgatgacggttttgtgtttcgtgcggcataaccaaataccaatccgggcggggtgtcaaagccctgcccgctaaaaacaaccaagcgatgaaacggaaaagcatttataaaacctttggcgggcgttgctgctctgccttgcatggcggttcaccagcgtagccggagcgggcacgacgataacggcgtatatcgtatttcgtgtcacctgtttcctgctccgtgtctgcctttcagccgtttatgcgctgggcgtggctctgcttttcctgtcgttgcttttcttactgatattataaccataaaaaaatagaacatcatacagtcacttaacaaaaacggggtaagcattacccaaacaccgggagaagaaaagttcgtgaaatactgtttaggggctttatattttccaacatatttctgatgattggttatcagttcatttatacactccttatcacgcttaatcaggcgttcttccaacattcgctttacttccttaatcttgtaaaagtaatgccccttgatgtcggagtaagaaatcattcctgccgcccgtaggcgttgtaaagtacggtcactgattttcaggaacgtgcagacttcgtaactatccacccaaatttcatcttcatcagtcttgttttcgtccaagtgattgaaaatgtagtctgctatggcggtaatcttgttgtcaagttccttataggcttttgactcaaatgttataatctccatattgctaacttattgatttgccgcaaagttcgggagaagaaatagcctaaaagtcatggttatatctatcatggtattactttttttcaagctatttttaggggaatattggcgtaaaagttccccaaaatgtcatttttcagagtagatttcaccataaaaagaaatgaaggtgtgtcaaaatgcacaccttcattattttacgtacaaagccccgactttcacaagctggggctttgttattacctaaagattctgtatctttaggcataagaatttcactatgacaaagatacattttcgtccttacattcccaaccaaaccgttctttttcctcaaagaattgatgaggatattgcagaaaacgatccggtgcgcatggttgacgccctggttgagggcttgaatcttgaaagtttcagaaagctgtataaggaatgcggccgcagcccttaccaccccaagatgatgctcaaggtcattctgtatgcctatatgaacaacatctactcctgccggaaaattgaaaagcttcttcaccgtgacatccattatatctggctggccggatatgagaaaccggatttcattaccatcaaccgtttccgcaaccgggtgaagaaggaaatcaacgaggtgtttacgcaaaccgtacttcttctctcttccaaaggcttcatcagcctgaatgtggaatacattgacgggacaaagatcgaatccaaagccaacaagtacactttcgtctggcgaaaaacggttgagcggaaccgtgaacgcctgatgaagaagatacatgtcctgttagggcagatagacgatgtcattgcccgggagaagtcatcagagaacaatgaggaggttgagttcactccggccatgctgactgaaatggcaggagaattgcgtcatgcattggaacaggtttccgagccatccgcgaaagaggaaaagactgaactgaaaaagaaacgcaaacagctgaaggaactggaagaacacagggacaaactgcaggaatacgactgccatctggaaacactgcaagagaggaattcctattccaagacggacaaggacgctacttttatgagaatgaaggaggatgccatgcgcaacggacagacgaagcccggttacaaccttcaaatcggcaccgaaaatcagttcatcaccgattttgcactcttcccgaaccctacggatacactgaccctgattcctttcctgcaatctttttcaaacaggtatgaccggatggcccatacggtggttgctgattccggctatggctccgaagagaattaccgcttcatgtccgaaaacggcatggaagcctacgtaaagtacaactatttccacatggagcagcggccgagattcaaaccggacccgttcaaggccgaaaacttctactacaatgaagaacatgacttctgcatctgtcctatggggcaaaggatgcggaggataggcaccaggaatgtgaaaaccgcatccggatatgtcagcgaaaatgcacggtacagagctgtcaggtgtgaaggctgtcccctgcgatgccgctgttttaaagcaaaaggaaacaggacgatagaactgaatcataggcttagacaatacaagcggagagccaaagaactgctctgctcagagaaaggactgaaacacagagggcagagatgcatagaaccggaagccgtgttcggacaaattaaaaacaatatgaactacaaacgtttccgacattttggaaaggacaaggtcttcatggactttgccttcctagccattgccttcaatataaaaaagatgtgtgcaaaactgacaaaagaaggtatgaactggctgataggatggttttatgagcttactgtcgctttatttagatgctggagacacataaatcaaagaaatcttcgaattatcgcagcttgaagaaaataaaccgatttatatcggtgataaacaagaaagaaggtgcatcgtgcattacgacacaccttccttcttacatactggaatactggagattatttcatatcatcctcattcatccgcttaacaagattatctatcagatgatgaagatatgccgtccggtcttttctctctttcatggctatatatgaagcgtaataatcccctaaatcaatgtggaatatcgtgctaaggaaattcatcatttcttttatctccacgttgccattgtttatgtcgcctgaagatacaagagaatatcccagttcgatcagatatgactttttgcctgtgaagcggaacgggtatttgaaacatctttgtagattatcttctatctgattattcgttaccagtttcaccaatcgcttattcagataaatgcgcagcatttcattggcgataatctttgccactttatagtcatatccagttgagaaattagggtctttgtcaaactgtgcgctatcggtacataaccgcaaatctacctttccacgaacaaaataatattcatcatacacagtggagtgtgaacggtagtattgataaaagtccaaattgcgattgaagaaataggttagattatccagttcccgattgatataatttctaattacttcatcgctaccattaggacattgtgtttcaatcttatatattttatagaagaatagcaaccgaccaagtaattccggtttctgtgtcttgaaaaataagatttcatcctctttggttggaaatatataggtttgtattttagttctcaaatcatcaagaactgtttgcagtttatgtaccattgaaagagaggtttcgataatatcatagccgtagaggtcgatttctgaaatatcaacctctacttgctctaatatcttatctactacctttttcatcgtataagtagcttatttcattatgctattattcgattttacttctttttcattcagtcactgttcttttgatatataaggaggataatcatctttagacaaccttttttccaatgtgtcaggggatatatcccaaagcgttggcaaatattcaaatacgactttcccgttatcaagataaaaacgaactttagaattgaaagcgacaggtttatatttatcttctcctatgggattatctctatataacaactgattttcttgccattttagctctatcccgtcaaaagttacatcaaatattccacaaactacggcttccattgtggaatcttgaactgttgttgaaacacagcgcatataacctgtgatttgctttgtgctttttcgcattgccaattcataacaaaacacactcgttcctgtataatctttggctatggtggttcttgctcctttatcatccaaattgtaaaccaattcttgggtaacagttgtcatgtcgaacttgaaaccgtttcccgttgtcactaaatttgagaatgtcattttgtcgttatatacgccttctaaatttccgttctctaatttatagactgcaccagtaagcaatgttttaccaatgatgttctcttttaaaaattgaattatttcgtctttcattttatcttttgttttacttcaataggtaaatagatttccgttaccaattcttccatgcttgctttatcgggagtattggtatatatttcaaaagtcatttgttctcttaaacgatacttgctattaggtaaccaatcaaggtaaatatcccgataaattctatttaattcatggtatcttccttttatattgaataccgaatatagacctgtttgtatgtttagaacactgaaacctttaggaatttccattgaatagggaacagttataccaatcaaaaatcggcatttatctatttccgtaatatcaaggctatccaaactgatactaacgtatttgaagcctttatctgtcagattgtatttcttggcaaattccattatttgcttccataaagtagaatatgcttgcttatttctatgtgttcgctcaaatttcaaatatgcaactttaatttctttaatcctctttattgaatactccagttgttttataatcttgttttcataagcaacatttgaatatgcttttctgaaagcaggaatagacatctgaaaatgcttcttaaatgcccttgataaagtatgtttgttttgaaaatttatctgttcaagtagttccgatacccttgtattcgttgaaataagtttgaaagcaatatattctaaccttaaccgctgaatataatcaccgacattctctccaacaacatctttgaatactctccggaagtgatacatagacatacaagctacatgagataaattgtcacaatttaagtcctcaaataaatgcctgttaatatattcttgaacattcattataaggtcatagtgtatatgggcagtgtttatcttttgcttccaccgctttagattgggtaacctgtcggataacacatttctcaattcctcgcttttgtaattcgtaccagcaatttgattataagaatcggggaaaagtccccaaaggtaaatgaggtattccattgagaaattaaaaagatatttgccggagttcaagcaacaagaacaaaattcctgattgagtgtaccatcagaatttgttccatattctgtaatatcctcaatatctaatggcataccacaactttggcaatatttggtttctatgtctgtttccattgctgtttctattattgagagcaaagttactcaatctgttacgaaatcagttaccataaatagtcatttttgaaataagctgcaaaatcgtaacctgtgtatatcatttatagcaaacttacttatactgcaaattgtcaattgctctctgaatcccgtccaaaaagcgggaagcgtgcgccccgtccatttgcgtgtggtggaactggaaagaaacggtaagtgtcgttttcagcaggcggcgtttgtatttgccccaaataagaaacggattattaaaaatgccgctatacatcccgacagcaccgtctatttcatattgtgccaatgcggaagttccgataaccatgctttccgtcaagtcgtgattgacgcaactttcagccacttgtttggtaagttgcagatagtgttggttaaacaaagatacatcatcacagaaaggaatatcacacgaacttacctcgccttttctgttagctacaatggtgtttactgcaatggtatcgtactgcatcaatttaccgccaacgggcagcgtataaaattctttcacgtcccttgcggctttgccgatgcaccagcacagcaacatattacacttcatgcccgattttcggctaattttcacaaggcgtgacacgttgagtgtcttaaagaacgtcaccattggcatgggtgcgttcacccacatttcaaaggcgtatgcccggctggtttcttggggatttacttctttcatacttaatgctattttcatttaatgaatcaggtagcaaaagtaggagaagcgtttgaacccggatagaacaaacgggacatttatacgggattggtgaacaaatcggaataaggatttgatactttcagcaaagacatgggcgtatatccgcagaacttcttgaaatcccggataaagtgtgactggtcagcataaccgctggcgtatgctatttgtgcctgattgatttctttgcccgcttgatgctgcatctgcgccaaagccttttggaaacggacgatacgggtatattctttaggattgatgcctacaaatgaatgaaacaaccgctcaaactgctttttgctcagggcaggcaatggaagataactcgtttacagagatttgcggagtgatatatattcgctgtatggcggcatctatccttctaagtctgtatgtggtatcagctaaattatcggcaatttgtgacaccagccatttttctatatagcttatgcaaatggaattattctcacagtcgaatattcgtgtagtcagttcattcaaacttttgttttcaaggctgtaaccggacacttcttgattataaaaaagtgaagtcggtatgttcagaaacatactcatagcgtgagggtggaatacaaccactatcatttctgtattgccgtcagcatacaaatgggatgaaaaattaacttgtccgctgacagtcagtttgtgttgtgtaacattcagttcagggatatataacggtgtttgtttatggaaaatgatttgagggcaaccgataggataagtaaaggcatccagcggtcgattgctcttgaatacccaataatacctgacgtaaggttgcagtaacttacaaggtttgtaaaacttgaactcatcttgaatcattttacaaatctttatcactaattgagtctaatatatttttcatgcgcttgctcacattttccaatatatcagtgtatttattgtaatttccatgtatattattgacttgtcgacatatctttttcttgttttttatccagaccttatttaataggtctatatatatttgatactcgttttccggatgtaaatattgaacttcttccattagataggaacatctattactatttataggatggttattaggagtcggaatcaaatttgcctcttctaaccaagaataaataagaaaaaagaaaataggtgcaaaaagtaataacatctgatttttatctgttaggtaaatatgatacaatacgtgtactgcaaaaatatcagccacaatttcttcatcatttttcattttatttctaatattaggagaaggttttttgctgaaaggccatacgagttcttctatactatcaatataagcatgtcccatttcatgaagaattataaatatttcaattcctgataacagagactcgtcttcagggattagattaaaaaagctaaatgcttttgcatgattattagtaagtagtccaattgtcgttcttctaaattgtcgatgcattctccatctaattatattccataaattggaattagtttgttgctctattataaaaggctgcaaacatctgcaaaagacatgcgcaaaataacaagttcccgatgtaatagaaattcgtttatccataccaaaccatgatgcatagtctgcatttacaatactccatcctgaaacatcattaattccatctattggaatgataattttcaagctatccaatgttttgcaaataatgttatattcttcatctaatattgtttgataatgaggtaaaggtaatatctttttaaaatagtaatataaacaaatttcggtgttaagttttattatccagcgaaagaatgaattgttaggaaaatgctttactaaaaacaatataactctattgtgacgataaaatagaaacttaaaatccttaatgatattttttttcaaacttggttgttgagttattgctgtagatattctattagtaataatatgtaatttattcataaggcttttctctttaattatgatatatttggatacaaatttaagataataatatcaagactagaatattttgagcatttttagtgcaaggtgcaagtatatatctatatatagcttgcaccttgcactaaccgcagaatatttattttcaatgatttgcatttatcaaaagaaagccgtatctttgaaccgtagttttaggcagacaacgaacagccaaaaggtgacagaaaagcgttattcttgtaacctaagttgtaccccctaaggctttgacatgatgataagaaattgaatttcaaggatattggggagtcggttcataaccctgtctctccgctggaaagaattgcaaaacaaagaagatccctgtaaactaataatttacggggatttttatttttggtacatagcaaaaataagcatatcaaagcattctttcggtgtactattcggtgtacctgatcgcttttaatactatgtacacctatttggtaatgtaatcatacagaacaaaatgtagatgcctaacgtaagatatactatctttctttttcgataaaagtagtgacaataaagttgtcataactataatagttatcgtatatatactcatatatctccatcattatgggttaagatagggatactgtcaaatgttatcatgctttgctaatgtcttttttctctgtaatagatgtgaaatgcctattgctaaaagtaaatacaaaacaagaacttggttcgccaaccatacaaaaatgaaattatcaatgttggggggaagatatgcatcattaggcgaatatctaaccccatcccaatattcttttaattcttctattttaaaatagtaggtgtaagaccatatgttaaaacataataaaatgatggttgaaattactctcaaggttattttatgcaaaacaatatcccaaattacaaataataacagtgcaattatcaacaagaatgcttgtaaaaaaggagtgaaattcatgcctccatttgtatctactatacatatagtccatcttaaaatacctattattattccaaataggagaaaatagaccgtatggtgtatcttgttttttatgctcattttccagaattgttgtcagcttggacgtttgcatactctatccgtatgcaattctcactattcttttcttctttgtatgatgctccctctctgtttctgaacgttgtccatgcagccgaaagtaatatcatatagccacaaagataaagaaagaaatagaaaaaccgacagagtagttggttctattttattaaagtacttttaacggggatttattgctgtcttatgttgcctgcaaccagcattttcaagctttcggcagtgaattgaggcagtgcaggcttcgtggcgtgacagtttctttagcggcaattcatttttattcaacgcagtaaaatgatatttgttatatatctgttttagctttgaatacggggaatgttctctgtatttctgtttcaaatccaaaccaataaccgcattttgtattttcatcgagcggaagaaagcaaagtcgcagattacttttatattctccatatatcacttcccatttctcaggcggaatctgatgtttggtttttactttttctgccggagtcttttttaaggacatgccagcttctatccaagcaatgcttgcttggattttatattcaggataggccagtttgcaatattcataaagtataagcccgcgtttctccaaactcataggctggtctatcagatttacctgtatcagatatttaaggaagttatgtagaaaatctttgtcatttaatattaactctctggttagtgtatgccaggcgggagtattgtagaaagcatctaacaggcgagacagccggcgagcggtttgcagttctccaacgctgatttcgttggtttccaaaacttcgtaaggaggaaagggggaatagcgtattccaagttcttctgcccgtcgacgcatttccgtacctggaagcaatttgagtgattccagctgtatctctcctgcattgtatccggcaagggtatatacatcttcaaatatttcatagaggtgatagaggggaagtccggcaatgaggtcggcatgcatttccatattcgggagcgagcatagaaatttcagcccttttaaggcatcggataattttcccatacggtggctttgctcaagaacaggttcgcgcaaactttgaattcccgcttcgaggtgaagcagaccttgtggcaattgtttcaattcttctttcagttcttcggaaagaagagctggatgtatctctaaatgaaaatgtatatcgggatattctaaaaacagctgaagcagttcttttgcgcgatgcgtattgtagttgaatgtacggtcgagtacacgtatgtttttgataccgtgttcgtgaatggtttgaagccgttggcggatgttttcaatggagagtgtacgtataggtttttcgccgccgctgacgcaaaaggcgcatgtgttgaaacatccgcgtgtggtttcaagttgcacaaacggtttgtcccaattgaagaaacagcttttttcgggtggaatgagtctggaaaagtttaagacacgggctgttccattgtctctgtattgcttgtcagtgtccaaatagcatagtccggcaatatcattccagagttctggttggttccagcaagtcagccattggggaaagacttcctcgccttctcctctgaatacgcactccacaaaagggtacttgcgcagaaataactcattatttccgaggaactccggaccgcctaatatgaggcatgcttcgggaagtaatactttcagccttgaagtaatatgcagcaactgttcgtgattgaaaagccaggttgttgcagctatgatgtcgggcttatggcggtaagcttcgtctacaacggttcctacattctcatttatcgtggcagatactattgcccattcaatagatgagtcgtttgctatctgtgcatgtagcgcaggaagtgccaatgaagaatgagcgtaggaactatttaggtctatccaaagaattttcatatctgattaagtttcgtctttgcaaagatagatgattttactgttaggataaataaaaaagtatatatttgcgaacagttagtaaatccgaataggttcaaatgctatgaaaaaattcctttatatctgtttcttattttgggtgaacagcgtttttttgatggcccaggaaaaaaaagagagcggacaatcttcactttatacggatcaatatattacagatatatatatgagtgaacccgaccgtgccttgcagttgctggatgaagctgaaaagaagaaggtaatgatgcctgcgcgcataaacgatttgcgaagtatggtctatcgtaatagatatcagtgcaaattggcttttcgttatgcacggagagcttatgttcaggattccattgctggtaatagtcctgaacatttgcttaagatgacgattgcattggcggagttatcaagcttgttgagtgaatatgaggtgagtaaccggtatgttgttgaaggtatcaggcaagcgagggatatggagaataagcgggcagaggctaaactgttgttctgtatgggagaaaataagcgctggctgtcttttaaaaaagatgcttacgaaacatttgatgaagctattcaacttttgagggatgctgacgatgcatatggtttgcgtatgctttcttatttcaacggggttaaaatgagttttttgatagatgatggattaatagatgatgcgttgtccgttgggctatatcgacagaagctgttggataaaatggaaggcaaggaaggaatacaagctgcttatttggacttacagaagtcttatctgtattccaaactggcttatttgtattattgttcgggtgataaggagaaagcagaggaatgttttataaaatataagtctactttggcagcttcaactcctgccgggaaatacgatgctactccctatttgtttgtgacaggccggtatagggaggttttagataattgtcgcgagctgaaagaagtttttaggagagaggatacaattaattatcagtatcgtggcattttgtctaaagagataaaagcttataccggtttgaaggaatatgaaaaggcagtgaagctaagtactgttttcattgctttgactgacagcatatatcagcgtgaaaaaacaaatgcggcattggaattagaaaccttgtacgatgttgatgagagagaagcccacattgcagaacaagctttaaaattgaagatacggacaatttctctggcttttattttttttatagtactgctggtcttgttttttctttggaaggtttggctgcagaatcgtaatatcaaagaaaagaacagggcattggtgaagtatgtaaatgaggcgctgtcagagcaaaagaagaaacagcaatcgccaggtgaagatgataagtctattctgtataatgacttggatacagaatcttccgacattgataaagagtatgaaatcaataaacaggtctttcagaaattggattctttgataaggagagatgaattgtatctttctgcagatttgtcaagagaagatttagtcagaatggcgcatatgaataatacccgttttgctaagatgataaaagaaaatacgggtactaatctgagtggttatatcaatgagttacgtttgaatcatgctatacatttgttgaaggaacatcctgaatatactttacgtgctatagctgaggcttccggcattaatagtatgcctacttttcatagtctgttcaagaataaaacgggaatgacaccttctgaatttaaaaagacccaaatggatatgaaacaataaattattgttatacaatattataagacttttctttataaactttaggacatttctttatagcaagagcttttaaattaagatgcttcatgcagaaaagcttttctttgcagtataaaaacattgctacgtatatattttgttggctgatgccatataatatacgccaaagtaatgtatggatatattttatgcaataataaacaggagttgaatttgagtgctactgacgcagtatatgaaatgcacgagaacaattttctacgttctttgactgatttgaagagcccggctcttttgcacaggggactggtttggggttatcaatatgcaagtctattgtaaagagtgcgggaatggaatcataagtgttggttcctaatcggtgtggaaagtctgttttgagtgattctattctgctgtttgcaacttattgaagggatactaaagagtattctaagttctgtttattctggggtcccgtaggtcgttgagatttgcgggactttttggggttagtctgaaaaaaatctgtaagtatgttaatttcaggctgttaatttatataatctaaaaataaagaatggcatatctccgactcccctaaactgtgctctaaatgctttgattttagcattgaatgactctgctgcggcattggttgccctcctttcaaagaaattgattatatccagataatgtgtttgtatagaacgtgcgacccttccaaaggtgaggaaccctgatttatctacttcatcataccaccttgccagccttgtcaaagcaatatccttaaacttacactgatgatagattaagcctaaccgcatagacagataatatcctttctttatatcgggatattccttgaaaagaatttcagcccgtattctttgagactgagtccataaggattccttcttgtaaagcagataaatacttctcgctaacaactgctttcttgtatctccattagcgaaaacaggtgcatgatacatctttccacaggcctttgcataagcaatctgagtggactcttcatccaaagcctcccagcgagcttttacacgcatctcctgcacagcttcataagctaacttctgtacgtgaaagcgatcggtaacacgtttggccgcaggaaagcagatgcgtgcaatctgctccatgttaggagccatatccaaggttatctcgcgcacttggtaacggcggcgacgggagagcttaagcaggacagaagtgaccgtatgaacgtccgtacctttaatgatggcaatcatactacctttaccaccgtgagcttctttattggtcagtacagtatagagttccccacgcgagagggctacctcatcaatacagatataagcaccgatattcttttcgaatagtagccaatcctctgcatgaacaagttggtcccaatggagataaccacttagatggttacggtattgacgctccaataaatccccgtcaactccatataaaacacctaagagcttgcaactgatcggatagctatcaatatagttcttttaaaaaagacgcaaaatcctgcgtcatacgagtaccttcagccaccatacgccagttacgggagatatactcattatgcttctttaagagccagcgacgacgacgaatattaaggaagaccttcttgccacgaagaggaaaatcctgaacaataacaggagcataaaagcctttactctcaatatcctgatctgtatacttctcaggaacgatatttttctcctcaaggtagatcacaacttcatgtacgctttcacatcaacaagatcaaagtagtctaaagtgccttcaggaagaagaaggcgataaccgtttaattccataagctatgaatttggagacaaagataacaatttataaatttactcctcaggtttttacattaaccctatttttggattaatccccccaaaagcttgatatatagcaaaaaagaggaaaatcattactgaaattcctctttcttttgggtgactgaagggactcgaaccctcgacattcagaaccacaatctgacgctctaaccaactgaactacagtcaccatgttgttgcatttcttaaatgcggtgcaaagatatggataatctttgatattacaaatgttttggcgttttttttgtaaaaaaatagctatttattattttcataaatttctgtattatgctgtaccaggaactttcgagtgtttttaatgaagatattcagacggttacgggctgattgcggcaaatggctatgtggtgagtaagaaggatataaaatgtaatttttttctccggtgagagtggggcggccggtccatactaaagtgtatccgcatcggacgacacgggcgaatggaaaagaagaggcaaaagattcgggcgacggtgaatgacttgaatggttttgtaatggacggatgggcttggggagaggatatttttcaagttgcagcgtaaagatgagtccaccgtctgtatttgcagcgctcatattggagatgaagtttcctaaagaatagacgatggcatgctgttgattgccgttcgtgcgtaattccataggctggattacgtgcggatgcgaaccgataatatgggtcaccccctgtttcagcaaccagtcggcaagctcgcattgctcacggttcgggagtgattgatattcttctccccaatgcatacaggctataatagcatccgggcgtacggcttgggcgctatgtatgtcttttagaattgtttttttgtcaatgtaattgactatgttgggtgcagataccttgattccattagtgccgtaagtgtagttgagtatggctatgcagaaaccttttttccggatgaagagaggatagagttgtttacgttctatagcgttccggtaagtacctgcatagggtatggaaaatgattcgatttgtgtgatggttcgttccaatccggtcttgccgcgatccaggcaatgattgtttgctgtgagaagaacgtcgaatccggcatctttgatagcttgcagatattcgtcgggtgcactgaaagtaggatagccttgataaggttttccaccgagagtcacttcaagattacctattgcaatatcggcacgggagatttcttcctttacaagggagaaacaaggagaataatcatatttcccgtcggaagtgcgggcggcatctatttgcgcccggtgttgcattaagtctcctacaaataatagcgtaatcctttcctgtgaggaaagggttacgctatatagtagaaagataagggagatgagcgctttcatcatccttattattgataaatagctttcttgcctgccaacaatgtattcttcattaaagagacaatggtcatgggacctacaccaccaggcacgggagtgatgaatgaacatttgggagctacttcatcgaacttgacatcaccggtcagcttgaaaccggattttctggttgcgtccggtacacgggtagtacctacgtcaatgacaactgcgccttctttcaccatttccgcttttacaaagttaggttgtcccatagctgcgatgataatatcggcttcttggcactcttttaccaggtctttactgcggctgtggcaaacggttactgtggcgtcaccgggataagccttttgcatcattagggcagccatgggtttgcctacgatattgctgcgccccagtacaacgcatttctttccggaagtttctattttgtatcttttcagcaattcgagaattccgttaggagttgcggaaacgtaacaaggcaatcctatggacatacgtcctacattgataggatggaagccatccacatctttgtggtagtcgattgtttcaatcactttttgttccgatatatgtttgggcaaaggcagctgaacgataaaaccgtctacatctgcatcctcattcagttcgcgcactttcgccagcagctcttcttccgttacatctgtctcataacgaatgagcgaggacttgaatccgcatacttcacaagcttttactttggctgctacataggtttcgctgccaccgtcgtgtcctacaaggatagctgccaaatgcgggcgttttccgccgcgcgccactatctcagctacttctgttgcaatttcctgttttacctgttcggaaattgtttttccgtcaattagtgtcatattcaaaattattgtattggttattatttacatggcattattcgcaaaaataggtcaaataaccgaataaagcaaaaatcccgctgacttcattcgaactatgaaattagcgggatttatatgcaggatatttttctttcttatcgtttcagtttcggcatcatcttacccattttgctgccggtcaccattttcatcattttacgggtctggtcgaactgtttcagcaaacggtttacttcctgaatgttcgtgccgctgcctttggcgatacgctggcggcgcgagccgtttaggatggccgggttgctgcgttcttccggagtcatggagtagataatcgcttcgatgcttttgaaagcattgtcgtcaatatcgatatccttgatagctttgcctacccccggtatcatggaagcgagttctttcaagttacccatttttttgatttgtgcaatctggctcaggaagtcgttgaagtcaaactggttcttcgcaattttcttttgcagacgtttggcttcttcttcatcatattgttcttgtgcacgctctaccaatgacacgatgtcgcccatacccagaatacggtctgccatacgggcagggtggaattggtcgatagcgtccagtttttcgccggttcctacaaacttgataggcttgttgactacagtacggatagaaagggcggcaccaccgcgagtgtcaccgtccaacttggtcaataccacgccattgaaatccaaacgttcgttgaattctttggctgtatttacggcatcctgtccggtcatggaatccactacgaacaagatttcattcggattgatggcggatttgatggcggcgatttcgttcatcatctcttcgtctacggccagacgaccggctgtatcgacgattacgaggtcatatcctttggttttagcttcctgtatggcattttgggctatgctcaccgggtctttgctatcaggttcggaatacatgggcacttcgatctgctctgccagtacgcgcaactgttcgatagcggcggggcggtaaacgtcgcaagccaccaataagggcttccggttctttttggttttcagcatgcgtgccaactttccggagaaagtagtcttaccggaaccttgcagaccggacatcaaaataacagccggtttggaatcaatattgatttccgcagtttcgccacccatgagttgtgttaactcatcgtgtacgatttttaccattaactggctgggttttacagctgtcagcacgttttgtcctaaagctttttccttaacggtatcagtaaaactcttggcaaccttatagtttacgtcagcatccaaaagtgctttacgcacgtctttcagcgtttccgctacattaatttcggtgattttaccttcacccttcaaaattttaaacgacctctcaagtctctcgcttaaattatcgaacatagtatctaattacaattactaaattacaaattactcttattgaggcgcaaaagtacaaaaaatacctgtaactgccttcttttaaggacagaatattattacggttttgcggcagattgccttgaagcataaaatattccgttccaactgacgggaagactgaaatcatgcttattctccatacttttgctttttattatataataacattgaaaaagagcggaataacttatgctattccgctctttttcaaatgtttgcttttatatcttagttggttcttttccgtgtaggcatttaaccgttcatgctcatcaggaattcatcgttgtctttggttttttccaaacggtcttttacgaagtccattgcctctatcgggttcatatcggcaagatacttgcggagaatccacatgcgatccagcgtttgcttgtcttgcagcaagtcatcgcgacgagtgctggaagcaacgatattgacagccgggaagatgcgcttgttggacaggttgcggtcgagttgcagttccatattaccagtacctttgaactcttcaaagatcacttcgtccattttggaaccggtatctataagcgccgtagcaaggatggtcagcgaaccaccgccttcaatgttgcgggcagcaccgaagaagcgtttcggcttgtgcagtgcgttggcgtccacacctccggacaatactttacccgaagccggggaaacagtattgtaggcacgtgccaaacgtgttatggagtcaaggaagataacaacgtcatgtccgcattctaccattcttttggccttctccaaaacaatgcctgctattttcacgtgacgttctgccggttcgtcgaaagtagaggcaataacctctgcatttacggtacgggccatgtcggtaacttcttccggacgttcatcaatcaatagcataatcatgtacacttccgggtggttggctgcaatggcgttggcaatgtccttcatcagaatagtcttacccgttttgggctgtgctacgattagtgcgcgctggcctttaccaatgggcgcaaagaggtctactacgcgggcagacagggagtcggaatatccgcctttgcaaagtttaaatttctcgtccgggaagagcggggtgagatgttcgaacggtacacggtcgcgtacaaaagccgggtcacgtccgttaatcttggatacttttaccagcgggaaatatttctctccttccttgggtggacggataacaccttccactacatcaccggtcttcagaccgaacagcttgatttgtgattgtgaaacgtaaatatcatcgggagaagaaaggtagttataatcggatgagcgcaggaatccataaccgtcctgcatgatttccaatacgccggttcctgtgagtatatcgtcgaattcgtacgccttttcgcgttctattgccggcttgcgttcgggagcaacataattctcgttgttgttctgttgttgtgcaggacgttgctgctgttgtgcaggacgctggttgttattgttacgattgttgttgtatggcgtattgttatcgcggaggcgaagacgggagcgctgttgcggttgctctgttgcaggaacgggagtttctgctttggtggcttcgaatttgccgatgagctctgacggcagttctattttttcggttggcaaatcctcgatggggataaagtcatcctctgcttccggcaagacaggactttcatccggtgtaggctggggggctgcaacaactttcttgggttctgcttttttcggctctgtagtttctactttagtttctgccggaacggttttaggtgtttccgctacgggagccgcttcttgttttactttgcgaggacgtcccggtttgcgtttgggaacttcagtctctgctgcgggagttgcggctacggtcggctctttagccgcctctgctgcttgtacggaagcttgtacggcaggtgcttcttcggttttcccttttgtgagttcaccgttcttgttggctgtgaataccttgtccgctgcttctttcttgaccgttacgcgagaacgtttttgcttgtcccctttacgttcttcttttaatttgtcggctgctactttcttggttgctccagcaatggcttgttcgtcaagtatcttgtaaacgagttcttcttttttgagagagtctgtttttttgatacccaattcttgggcaatagcttgcagttccgacaaatttttgtcgtttaattgaatgatattatacatatagtatatgtgtgaatggtttttacttatatcggtaagtctaccttttgtaaattatgatttaatagggatatttgttattgaaccggaaatctgactaacaatcctcacctcagcaaggagttgcagaatgtttcaacggcacaaaggtaataataatttttggtttcataaataaatcgtcttttttttaattttaaaagtctatctttgtttcattattatataagaaacagatttatgaatatatatgcagttcgtttgattactttttcgcctacccatacctctaaacaagtgggcgaggcgattgttcgcggtacgggcatttccgatgttgcccggacagaccttactttccacccggccggcaaattggaaattcctgaaaacaccttgacggtaataaccgtccccgtctatggcgggaaggtggcacccctggcattggagcggatgaaagacgttcatgcttccggtgctccggcagtgctggttgctgtgtatggtaaccgtgcctatgaaaaagcattggtggagttggacgcatttgcatcggacagaggatttaaagtgattgccggtgctacgtttgtaggcgagcattcgtacagtacgcagcaaaatcccatagctgcagggcggccggatgcagatgacttgcagtttgcagaaactttcggcgctaagatacggactaaaatcgaagcggcagccgacatggataagctctatgccgttgacgtcaaccgtattcaacgtccccgtcaggcattttttccgttattccgtttcttgcggaaggtggtgaaactacgcaaaagcggagttcctatgccgcgcattccggctgtcgacacagaactttgcaaccattgcggatactgcgtgaagcattgtccggcaggcgccatcgcgaaaggcgatgagtgtactaccgatgtggaaaagtgtattcgctgctgtgcttgtgtaaaagggtgtccgcaaaaggcccgtacttttgatacgccgtttgccgccttgcttgccgattgctttaagaagcagaaggaaaataggattatcttgtaagtagattctggcatatctgccttcgggcataaattgagttcaaagagtattttcagcttcttttgaagctctatccggtctgttttttgtttttataagaagcataacggggtatgtgacgaataaaaatagaaaaatatcttcaaacaaggagtgctgaagaagatttaagcaggttcttaaggagaaggattcttgtcggagaggagagatgttctcttaaggtaagaagccggtaaatataggagaagaactttatctccggcctgaagatgggtgtcttttggctggagagatccgtttttaggttaaagttctgtatctctaacctaaagatgaaatggataatggggtactcttcggatgcagagttataccgcttggggctcagggtgtgacaggactgtccccggcgggaagaagccggactgtgagtacccgttttgtagaggcaccgatgcggaaacggttgtccgttctttcacctatcagccagataatctcttcgccgcaacataatacccattgctgctctttgcgcaaaagggagaacttccggtcggtcatatagtcgcttacttttttccggcctttcatgccgaatggaataaaagagtccccttgtcgccaggggcgcagaaggagaggatgtgtcagtttgtccgcatcaaagcaggcagtgttcttgtcgcggggaatgacaaagtccggggtaaagacatgttcttccattgccagtgcgggttgtatggggggtcggtgtgcttcaatcagcagatattcgcggtctttcacgatgcaccaatgttccgaagtgaagatttttcccggctgtccttccagcgaacggtatatgtctctgatttgggcagtgttaaagccgagcgggtataggatttcaaacagtaatgttgcgggggccggttcctgcatcagtcgctcgatgcagatgccctctgctgtccgcacgcgttttatgccttcgtctatcccttgtttatatatggcggatgcgccatccagatgctcggcggtgttgagaatgctttctttgacggatgggttgatttcctgcatcatgggcaacaggttcaagcgtattttgttacgagtgtattcatcctgcagattggtgctgtccgttacgtaatcctgccctatgcggttcagataactgatgatttctttgcgttccaggcaaagcaacggacgtacgatgtgcccgtttttggggcgtattccccgtaacccgttgatgcccgtaccacgtatcaggttcagcaggagggtttccacgctgtcgtcctggtgatgggccacggcaatggcgtcggcattgattttctgccgtatttcctcaaaccatccgtaacgtagttcgcgtgcggccatttcaatggagatgtgccgttcttcggcagtgcgcgcggtgtcgaagtggacggtgtgtagcggtacttgttgttttacgcacagttggcggacaaatgcctcatctctgtcggattctgcacctcgcaggtgaaaattacagtgcgcagcttcgcagtcgtagcccgacgcttgcaacagtcgtaataaagcgacggaatccgcaccgccgcttagggcgacaagtaccttgtctgtcggttgcaaaagctgtttccggttgatatattgtgctactttttccttttccatagcggcaaatatacatgtttcttcccggattttgttacttccgtgccgaaaggttgctttggcagaccgttgtcagcttgcttacaatgcagaatcggctctctttgatacctcttatttaaaaacattctaaattgtttgcgctatacggacttatcctttatctttgcggcaaaaataaaaaaggcagaagactatgcgtttgtccgaattgaaaaccggtgagaagggagtaatcgttaaagtgctgggacacggaggtttccgtaagcgaatcgtggaaatgggatttatcaaagggaaaaccgttgaggtgttgctgaacgcccctctgaaagaccccatcaagtataaggtgatgggatatgaaatctctttacggcgtcaggaagctgagatgattgagattgtcggtgaaaaggaaatgtgtcgggagtccgtgcagctcgactatcacgagggatggagcgaagatatgcgtttggacgaagaggaactgaaacgtatcgctttaggaaaacgccgcaccatcaatgttgctttggtgggtaatcccaattgcggcaagacatcccttttcaacatcgcctcgggttcgcacgagcatgtgggtaattacagcggtgtcaccgtagatgctaaagaggggtattttgactttcaggggtatcatttccgcatcgtcgacttgcctggcacttattcgctttctgcctattctcccgaagagatttatgtgcgccatcacatcatcaacgaaactccggatatcattattaatgtggtggactcttccaatctggaacggaacctgtatctcaccacccagttgattgacatgaacgtgcgcatggttatcgcgcttaacatgtacgacgaactggaagcaagcgggaacacgttggattacgtaaaactcggtcagttgtttggcgtgccgatgctgcctaccatcagtcgcaccggaaaaggcatagaacagcttttccatattatcatcggcatttacgagggtggtgattttctggataaaaaaggtaagatacgtgccgaaatcctgaatgatttgcgcaactggcacaaggagtatgtacccgaccatgacttcggcactcataaggaggagaaggagcatccggcaggcttttaccgccacatccatatcaatcacgggccggaattggagcggagcattgaagaggtgaaacgcataatcagtgtcaacgagaatatacggtataaatactccacgcgctttcttgctattaagttgctggagaatgacgaggatttggagaagaccgtacaggagtttcccaatgggaaggatattattgaagtccgtaaccgcgaagtgcaacgcctgcgtaatgtaataaacgaagatagcgagcaggccattacagatgccaaatacggttttatcgccggtgcgcttcgcgaaacctatgtggacaagcaagaggatacggcacgtacaacgcgtgtgatagattccattgtgacacatcgagtatgggggtatcccatcttttttctgttcctgtatctgatgtttgaaggaacattcatcttgggagattatcccatgcagggcattgaatggctggtaggtgcgttgggcagtctggtgcgtgacaacatgtctgaaggaccgctgaaggatttgttggtggacggcattatcggcggtgtaggcggggtgattgtctttttgcccaatatcttgattctatatttcttcatatctttgatggaggattccggatatatggcgcgtgccgcctttatcatggataagataatgcataagatgggtctgcacggcaagtcttttatccctctgattatgggattcggttgcaatgtaccggctattatggcctcgcgtactattgaaaaccggaagagccgactggtgaccatgcttatcaatccgctgatgtcgtgcagtgcacgtttgcctatttatttgctgttggtgggggcgtttttcccgaacaatgccagtttggtattgctgataatctatgctatcggcattttactggctgtggttatggcacgacttttctgtcgctttctggtaaagggagatgacacgccgtttgttatggagcttcctccttaccgcataccgacgtcgaagtccatttttcgccatacttgggagaaaggcgcgcaatatctgcgcaaaatgggaggtatcatcatggtggcttccattgtgatatgggcgttggggtattatccggaccacgatgcatatcaggatgtggccgaacagcaggaaaactcgtatatcggcagaataggcaaggctgttgaaccggtgatagagccgttaggctttgattggaaactgggtgtcggtatcctttccggtgtaggggccaaggaactggtggtaagtacgctgggagttctgtatgcagatgatgccgaagccgatgcggtgagcttgggcgaacggattccgattactccgttggtggcttttggctatatggtgtttgtattgatatatttcccgtgcatcgccaccttagcggccattaaaggagaatcgggcagttggaaatgggctttgtttgcagcggtgtacactactgtccttgcatgggtggtgtcctttgcaatttatcagataggggggctgtttggatgagtaattggcaaaattgggcggtagctctcattttattgttgtgtatcgtccgtattggacagcgtgtttatgcttttttcatgaaagtaaaagaaaaacgtaatccttgcgagaattgtgcaacaggctgtgaattaaagcaattgtacgaaaagaaacgcttggaatgcagtgacggtaaaaaagaaataaagaaaaaatgctgttgatagttggtagtttcaaaaaaatgactacctttgcaaccgcaaacgagaaagattggttccttggatgagtggcttagtcagcggtctgcaaaaccgtgtacggcggttcgaatccgccaggaacctcaataatccctctcagattatttctgagagggattttcttttgggcacgctcggaacgagcattgtctaacgggtggaaggggtcaacgtaaaaacctgagggattcatagcttatgcataaattttcgccagtctgaacaggaagaaagctctgtcctttactcctctgaattgtgtgcggaactcctttatttttgcattgaacgattcggaagcagcgtttgttgaacgtctgtcaaagaagttgattatttcccggtaatgcatctgtacggaacgtgccactcttccgaaagcaagaaaccctgatttttccacctcgtcataccagcgggcaagatgcgtcaatgccgcatccttgtacctgcattggtggtatatcagtccgagcctcatggagaggtagtatgctttcttaatatcgggatactcccggaacaggatgccggcgcgtacgcgctgtgattccgtccacaaggattccttcttatataacaggtaaatgcttctcgaaagaagctgtttgcgtgaatcaccgttttcaaagaccggcgcatgatatatcttcccgcaggctttggcatgggcgatctgaacggattcttcgtccaaagcctcccaacgtgctttaacgcgcatatcctgaaccgcctcataagcgagtttctgcacatggaaacggtctgtgacgcggcgtgcggcgggaaaacagaggcgggcgatctgctccatgttcggagccatatccatggttatctccctgacctgaaagcgtctgcggcgggaaagacggagcagtacggaggtcacggtctttacatctgttcctttcacaacggcgataagactgcccgaacggccttttctctccttgtttatcaacacggtatataattctccgcgggaaaggcagacttcatccagtcccacataaacaccgatgttcttctcgaaaagaagccattcttcggcatgaggaagctgctcccaacagagataaccgctcaggtgattccggtattgccgctcgagcagttccccgtcgaccccgaacagcgttcccaacagcctgcagcccaccggcagcttatcaatataattcttttaaaaaagacgcaaattcatgcgtcatacggctaccaccggcaaccagtttccagtcacggctcacgtaacggttctcatccttgacaacccacctgcgccggcgcacgttcagaaaaagcttcttgccgcgtatggggaaatcctgaaccacaacaggttcgtaaaaacccttgctctcaactttcattcctgcgtattctttaggaacttcattcttttcttctaaataaatcactatttccgatgcgctttcctttacgtccgagatgatgaaataatccaatgtcccttcaggaagaaggagacggtagccgttgttgtccataagatttctgagttagttttatgcaaagataggatttttacaaatattacccctcaggtttttacattgacccgtaaaaatctagaacatcggtaactgataaatgaatcccaccgatactctgtttgtagaatagttctcttgtccgagtgctttggcgcgggcggtgaagtcataggaacgtcctacgtatgtaaggaagaaatgcaaattggtatccataggatagaactccacaccggcaaaataaccccatgcggtgcggtatttgcctttttccaaatctccctgctgtttggtgagagatgctgtttcatacattccttttacgaaagcgttccatttaggcaggaaacggtaattcaacttggttaccattgaaaaatatccggcatcgaaagcattgtgtccttccatactgcccgttatccctgtcatgatacccttgcggtcgataccttctttggagtacatgaagtcgaggaacatgttgaacttattcaagttcaattcattaccgaatgcaaaataataaagattcttgtcctttgcttcattcatgatagaggcggaccagcgtgtcttgaatatgtcattgaaattaccgttccagttcagggtgtatacgagcggcagcttgcccgattctatggcaggctgttcgccgtcttcggtttcaactccatacgtcttgttgaaagagccgttgcggctgtccagtatttgcaggttcaactgctggtgggcattgatgtcatatccgatgttcaaaccggtcatgaagttgctcatgttctcaatcatatcgctgtattcatatatctcgataggattcaggtcgaactcgataccgccgtatgcggtgcattgcttaccggcaaaaatagaaaatccttttcccagtttcacacctatccctgcaatgtcgatggaagtaggaaggttgtctatgttgccgctactgtcgttcgagcggttcagccgttgcctgtatcggtatgaaagccagttgttgatatttcctttggcttcaatgcggagttgcctcattttgaaagctccctcttcgaagccgtcgcggaagtttgcatcgaagctgccctgcatattgaggaataagttgaacttatcttgttttttctttacattggtgagttcttcaaacagggtcttgttttcaaggaacttctcgttcttctccgtgctttgggcgtacatgatttgtgtacagcccgcagccagaagtataaatgtgagtttctttatcatttctatctgtttttaatattcgttgaaatattcctgaatctgtttccagtcggtggttttggtcagtgcaagcatcagcaggacacgtgctttctggggattcagttcctgtgatgcgacaaactgatactgtgcgtcgtctacttctgcatcgagcgaagtgggacccgtcggcactcttgacgaacggactacgagaataccttttttgcgggcttccgttaatacggggaatatattcttgtgaatgtttccattgcctactcctgcatggatgatacccttatagccattgcttagcatcggggtcaccatgtcagcctcgatgtttgaatagctgtagacaattcccactttggggagtgagttcagattggtaacatcaaataccgagtgggtggtgtgtttctttacagacgacatattatacgtgaccttgccgttcagtacataaccgagtgcacccgcgttgggagcttggaaggtctgcacgtcaacagtgttcatcttcaatacgcttgcagcaccaagcacgcttccgttcattgccactaaaacacctttccctttggactcttttgctccggccacaacgacggcattgtataagttaagaggtccgtcggcgctgattgcggtagaggggcgcattgctccgaccagaactaccggtttgtcgctcttgaccgtcaggttgaggaaataggccgtttcttccatcgtatcggttccgtgggtaattacgatgccgtcgatgtcagagcgtttcagaagctggttgattttctttgcaagagtcagccatacatcatcgttcatgtcttgtgaacctatcttgacaatttgttcgccggttacgttagctatgtttttaagttcgggtacggcatcgagcagcgtaccgatggctacttgtccggcagtatagttggtggcggttgcagatgttccggttccggcaatggttccgccggtggcaaggatatggatgttaggcttctgctgagcgaaagccattgtgacggaaagcagtagcataacggctaccatgctgagtttttctaatcttttcataacttaatttgtttgaattaaaaaataggttaaaggtaaatatgcttagaaaaattgtatgaataataatcccaaggctatggcaactgccgtagagacgatacccggcatcataaaagagtggttgagtatatatttaccgattcgggtggttcccgtacggtcaaagttgatggctgcaactacggtagggtagttcgggatgaagaaatacccgtttacggcaggaaacatggctatcagcatatatggcgatatgcccaaagcaatgcccagcggtactaaagcacgtactgtggctgcctgactgtacagcaggatagacatgacgaacaaagcgatgccgaacagccagggcatctggcgtacgataccttcgatagaggcggtgagttgcgccatatttccattcaggaacgtatcgcccatccaggcaatgccgaagatggcgattacagcctgcattccagccgggaagacagagccttgtgttgcttttattccgtctgtcttagttaccagcaaaatgagggcggcagccgaaagcatgatgatttcgataatggcggacatccctaaggaaactgtttttccgtcaatcaggaaagaaggacgcatcccttcgaatgagccgaaaagaacgatgaatgccgtggcaaggataaatatgagtaccgaaatcatagcatggcgtttgtttgttacatcgtcgattttcactttcttaccgtcgaagtagccttctgccatacgtttttgatattccgggtcgtcaatcagttcttttcccacgcgcatggagcacaatgcgcctaccagtacgccgagaattgttgccggaatcgttattttaagtatgtcgaataaagtgatgtcgaatccggcaagcagaccgagcagtgcaaccgtagccgccgaaatgggacttgccgtgatagcctgctgtgaagcgatgacagcgatacccagcggacgctcaggtctgattttggtttcggttgcaacttcggcaatgacgggaagaaccgagtatgccacgtgtcctgtaccggctacgaaagtaaacaggtaggtgacgatggggctgaggatagtaacctgagacgggttcttgcgcagcagtttttctgctaactttaccatgtaatcaagtccgccggccgcctgcatgcaggaagctgcggaaataacggcggctatcatcaacattacgtctatcggtggtgcagtgggttgtaagccaaatacaaaagtcagtatgcccaaacctacgccgcccattactccgagacctatgccgcctaagcgtgcacctatgataatagcggtcagtacaaataataattgtaaaaccatatacttattatttaaaaaattagataaggttgttatgttctctactattggctaatttctaaaataatcccttatataacaataatagggggtgaatttgttgtatttattattttatattttctaaattaagcatatattaactgtttagtggtttggggtgataatcctgtgtattcttacattttgtcatattatatatagtaatatgtgtataaaaaggcttgtattaaatgttgttaacctaataataagtattattgtttacaaaacaatttatgctatctttggttattctttgatgaccgcttattgaaatagttaataaacatatattatgaaagaagaactatctacaaaaactcgcacagaaagcgatttaatcggcagccgtgaaataccggaaagcgccatgtatggagtacagactctcagaggtatcgagaatttccgtatcagtaaatttcatctgaacgaatatcctttgtttatcaacgctcttgccattaccaaaatgggagcagccattgccaattccgaacttggtctgcttaccgggcagcaaacggatgctatccttaaagcctgtaaggagatactcgaaggcaagcaccacgagcagttcccggtagacatgattcaggggggagcaggcaccactaccaatatgaatgccaatgaggtaatagctaatcgcgcgcttgaaatcatgggatataaacgcggcgaataccaatactgctcaccgaacgatcatgtcaatcgctcgcagtccaccaatgacgcttatcctactgccatacatataggaatgtattatacccacctcaaacttatgaaacattttgaggagttgatcaatgcgttccaacgcaaagccgaagcgtttaaacacatcattaaaatgggacgtacgcagttggaagatgctgtgcccatgactcttggacagacattcaacggatttgccagcattttgcgcaatgagataaagaacctgaactttgcggcggaggaattccttacggtcaatatgggagctaccgccatcggcacgggtattgcggcagaaccggaatatgcggagaaatgcgtgaaggctttgtcgaagcttaccggatgggacgtgaaactgtccggtgacttagtgggagctacttcggatacttcttgccttgtaggctactcctcggctatgagaagagttgcggtgaagatgaacaagatatgcaatgaccttcgtctgcttgcatccggtccgcgttgcggattgggagaaatcaatctgcctgccatgcagccggggtcttccattatgccgggtaaggtcaacccggttatccctgaggtaatgaatcagatatcctataaggtaatcggcaacgacctttgtgtggctatgagtggcgaagcagctcaaatggagctgaatgcaatggaacccgtaatggcgcaatgttgttttgagtctgccgatttgctgatgaacggattcgataccctgcgcacactctgtatcgacggtattaccgctaatgaggaagtatgccgcagatatgtacacgatagcatcggtgtggttacggctcttaatccggttatcggttataaaaattctaccaagatagccaaagaagctcttgcaacgggaaaaggtgtctatgaactggttctggaacacaacattctttccaaagaagatttggatactatcctgaagcccgaaaacatgattaagcccgtgaagttggacataaaacccaatatctaaggaacgggttttcggagcggtaaggctttgaatataagttgcgcggatttacacaagacggtttatgaatgactgaacggtcattagatgctgtctgtgtaaatccgcgcatttcgtgtggggtatgagttaaatatttgcaaagagttcatactctatttgttttgttatgcctaattagtttcttttgcgacaggaaatctatttatgaatacactactgtcccgtaaaagtggataaatagttctttgaaattattgaaatatagtcaattacacggttttttgaaatgaaacggacttgattttgcaactttgcagtctaatacaaatggctgctatgttccaagacaaatacgtattctctcaattaaccgcttttctgaacaggactcagttcaacaactatgttcgcaagtatgatggcaacagatatgtgaaacatttcacttgctggaatcagatgctcgcgatgatgtttggacaactgagtaaccgtgagagcctgcgagacttagtcgttgctttcgaggcgcatagggccaagcaatatcatcttggtttaggtcgtgaaccgatagccaagacaactcttgcgacagcgaaccagaaccgtgattacagaatcttcgaagactttgcattctatatgatgaaggaagcctgcgagaagcggacgaccaacatccttgacatttccggaaagaaatatgcgtttgattcaacaacgattccgttgtgtcttgcaacattcccatgggcaaagttccgaagcaagaaaggaggggtgaaagctcatgtcttatacgacattgaagcacaagttcctgccttctatactgtaactactgcatcaaagcatgattccacagcaatgtcttcaatccattatgaaccaaatgcttattatatattcgacagggcttatgactcctttaaagaactctataggatacatcttacagactctttctttgttgtcagagccaagacgaacttaaagtataagacagtcagatggaagcgaagaatgccaaagaacataatgacagatgcggaagtgaaactgaccggatatctctccgagaaaaaatatcctgagtcattcagactcgtccgatattacgacgaagaggatgaccgtgagttcacttttttgacgaatgcaaaacaactttctgcactggatgtcgccgatctttataagaaaagatggttaatcgagctgttcttcaaatggctcaagcagcatctcaagataaagaaattctggggcacaacagagaacgctgttcgcatacaaatcagtgtggctattatcacgtactgtcttgtggctattgtccaacatgatatgaagttgaaacgttcaacctatgaagttttacaaattctcagcatatcattgactgacaaaacccacttgcgtgacctgttcgacaagactaatttcaatgatgtcaaagatctaaatgatcccctgattccggggctttttgattaattgtttaactcgtcccattttaacgggacactaatgttatgaatacttaaaaacaaagaaaaatgaagcgactcagatcattggtacttggcctattcgcattgtgcagcatggtaggtatggcgcaggaagcagaggcagacgataccggttatattgtgaaagtggggcaggtggctcccgattttaccgttacgctgacagacggcaggaccgttacgctttccgatttccgtggcaaggtggttatgttgcagtttacggcaagctggtgtggtgtatgccgtaaggagatgccttttatcgaaaaggatatatggcagaagcataagtccgatccggatttcatgttaatgggcatcgaccgtgacgagccgttgaataaagtcatagcttttggcaagtccacgggcgttacctatccgttgggattggacccgggggctgatattttcgccaaatatgcgttgcgccaagctggtattacccgtaatgtattgattgatagggaaggacgcatcgtgatgctcacccgcctttataatccggaagagttctcggctttggttaagaagattgatgaacttctgaaataacctgttcccgtttagaacgaaaagcttgttccggcatttagcgacatcatgatgtcgctcccctgcacattatcctgtattagcagttccttgccataaatgcggattttgggttcgaggaataccttgaagcggcgacccacccggtaagatgtttgcagtcccgcttctccgccgataaagaagcggttctcatgtttcatccgcatagaagccactattccggcagatagctgtacgtcgtatttgcgttcggggtcatatcccgtcatcagattggtaaggttcagcatatagtcaaggcttccgcttgccatatcatattccaaggttttccctttccggtctgtggacagaggtccgtaatccgctgctaaacggagtgatgacaatggggtgaaaatgcgtcctgcacttatcgtggccatgtagtcgaagtagcgtttcggttcataccgcttcatttgtatgggaacggagaaaccgattgcgccgcttacaaagaaagaaggcttaaacaaatcacggtttaaagagcgtgccatacggttttcttcatcggtacgttgtatctctatacctatattgatactgtacagattgtctgtgaactttttggctacgtatctgccttcttccttttcattggtctttaatgaataggatgccagactggtgcgtggctctgcaaataaagaaacatcgccccaaagccggtatttaaattgcaagccgcctgtaaatcccgtatatccgccttttgcgggccgataaccattttctttttgaatatatcccagttcaccgcccgccaatacattgacggagaatttgggattgagttgcctgccgttaaaaaaataagtggcatccagcataccttccaggcgtcccccggcgtatgcggacatctcataaaactcttcaccggccgaactcgccgaagaggcgattactttcttatgccaggtatcggccgatttgaatgccgacagccgtaagccgaatgccggtatcagccatttgccggcagacaggctgatgtgcgggccgatggagtttgtcagtcccatttcacttgtcaggcgggaagcttgaaactgcccgccggcagcgatgctgagaaaggtattgtccaaaaaatgattgccttccagtatgcgcattttgccgaagggcttccatgctttcaggcggtagttcattcctacggtcgcaccgtaggtcatgtcatatttatgccagttcttttgaaaggaatggtctatgccgtcactcataatggtgaaacggggttccagataaaagtccacatgtgcggtagggtgcagtttcagttggaaacctaaatgcaggtcggccacatgttccactctgcctgccagtgaagataattgatagccgactcccgctacggtcaggaactcgaagatacgtccgggattgtagccgttgacgtaggatgatacattcagcagataatccgcctgcagtccgaaacgcaatagggtttcgttgtctattttgcgcgagaagttacccgccagcaatgaggcacgcagggcatgggcgggggcgaactgccaattggcggcgataccgcccacgggaccggtgttgaaatccgtgtttccgcgcggaatcattttgtccatgccgccaaacaaggagatatatacattgtttttccatagtgtgtcgaaaggcactgcatccggatgctggtaacgcctttggaacatctgccgggtagcatcgaatcctatgccgacggtatctttaggatgcgttgccggagaaggattattgcccgcttgctgttgggcaaaggcaaaaggtatcagtgtgtgcagtacaatcaatataatcagtggtttcttcatgatgttcaactctccatatccgtttaataaagtttccagtcgccctggtcgtaatattccataaattccttactgatttcaccgtcgttaacggctattttgtagtatttctcatccagtttgacgatttcttccaacttcttgcaggcttcgtcaaagtcgagggcgttatcgtagctccattcatacagtttcttttcccggatgtaaatcaccagtttcatgtatttagtcatggccgtttcaggcagttcttccaatgctttctgtgcttctttgttgtaattgtccgtttccatagccatgcacattacaatattattgagcggtgacgactcctttaccaatttgaatacttttttacgttcctcgccctcctttacggtggctgcaccccggtagtcgtagtatccgcccagacagttggcaaatgcctttatcatctggaagcgttcggtatccggaagtttgtcggcaaggatgctggcctcttcaaagttataggcgcgtatgtacattgcgagctggttggcgacgattgtttcggggtttacctcagtcttggttatgctgataccgtcattgaaagagtccaccatgttcactttccgcttaaggtcaatcaggggtttcagtatctctacgtcgaaagtatccctgcgtagcagtgctattgcaaggttgtttgccgccagaatccacggtttttctttccctttcgtgtcgtaggccattgtttccctgtaagcgcgccgataaagtttctccgcttcttccgggtcttttatcatccggaacaaatgccagtactcgtatcgggtaaacgactttttgccgtcggcgtattgagggtcgtgcaagtatttgtccaatatttcatccggattcagttcacggaatatttcatgtttgtattcgtactgtacggtgcgtagtttgggcagccgttctttgatgatggtggagtagtagggcagacgcgatacggcggcaaactgcgcatccggattcttatatttcccgatgatttcccttatctcccgcgcttccgcagtgaggctgtcccgttccagtaaatcggctacttcattccaagtggcaacacgggtttccgtaggatgcttgtatacccggctccatttggcggcaggtattaccgaagtgattttccgtagggcgaaagccgttcgttgcttggcaagcgcaaggttgctggcatagcgtccttcgggagacgatacgccggttatcttaaattctttcagtgtggtgccctcaccgtttacgatgttcatcaggtcttcctgcaacttgttcatctgcaccacattggcagagtcggcaggatccagttcggccttgcccacaaggaatgtcagcgaaatattgcctgccgtattccgccgttcgcgccggggcgtttccttgtatttatcagggtctaattcaaaatcggggaacgagaactccagaaactgcaacgggcgttttattttgcaggtagtcattttccattccgcttcgtatgtagggtgggtatagtctgctataataactttggacaatacactgtaaatgcgtctggggtcgggtacgggtaccgagtcgttgatgtccaggttgaagcgtgtggcatccagttggcggcgggtattgatatagggagccagtttgtcgttcctgatgtcgtaggccatgcggcggtcttgcgtcagtccgtattcggggccgtccataactgtcgggtccatgtagctcactatctcttcggtggtacagtccatgatataaggttgcatgatgagccggcggttgggcgcgccgtaattgctgggaatggctaccgagttgtttacaatcagtttgttgcccactattttcccggctacgggccggggttgcgggtttgggttttctgccacaacttccacctcctcaagagcgatgccgccgtcgatgttggcgtttatctcctgtttgtaattcacctcgcgcagttcgtttttcatttgcacgttaaagattagcgcgccgttttccgctacacgtatttcatagtatccgtcggcgcccgccacggcatcggcgtcgaagagtaatgttccgccaccgccggtttcaagtgctttcagggcatcgcgtgccgaggccacggtattgaaagcaaaaatacgcacggtctctcccatggggaaggggcgcggctttttttcaccttcgggcaggttcagcactttgccggacacgatagtgatttgttgcgccatgcttgatgcggaagataaaatcatagcaatgcaaacggctgatgttatgatgaaatttttcatggcggttattctttatttgaagatataggatatggagacacctattttgataggcagcagtttgtaaccgttggcgttggcttgtgccgttccgtcggtgtagtcctctatgttatcgtttttgtagtattgtttttgcttgaagtacacggcgccgaatccgccgtaaaactctacgttgaggcgtcggttcaggttcagcgcatagccgaaggtaatcccggcgccggcagcatcgccctgatagatgcggtctccccatgtgatgtcgtaggacacgccgagagcggctattcccacaaattcccgtgtcatggggcgtccgttaaaccaatagcggtattcgggcagaagacctatcattttggctttgttgccgtagatgttgactgcgccgaaagccgagatgtcgatactgctccgttcgcccacaacgaattcgcagccgatgttgggagccatggcggcaagcatcaggccgttggtctttactgccagttgctgggcgtgcagggtagggaaactgcaaagtagcagcagaaagaagatgctgcttaaagagagtgtatggtgattggttttcggcatatcggtttttagcgttttgttggttgggatttgtaagttccgttctattgaaatgtatgttccgtacccttgttccagtcgtttacggaagcttttgcagccatgttttgcgtatataggatgttgagggtggttatgctgccggcttccagtacgattagcgggggagggtttgcaccggcatcggcttcgtcgaacactacgatgtctttttcgcttccgtccggctcttttatactgaatgtcaagcggcggagcgcactgatagtctcatgcccgtatggcagcagcagataatccttttgaatgccggctgttccggggataaggttgagcggggatgcttcgttccggtaatcggagctgacggatgtaccggtgtccggattgtcggatgtgatgtcgcctgtttgcaggtccattgtccctgtttgtccctcacgggtggtaaaaccaatgctttgcaacaccgggtatgagtccgccgtatattcggggcggtcggtggatatgttgaggcgtagccgtgccaaggcatgtttcaaggagacagcaacgcctgctgcggttgcagccgctttcttgctgcctttggtttcaccggtgtaaaggtagtctgtggcgtcctttgcttccagagcggcggtaacgggaatggatactttaccgttttcatctgcagcggctgtttccgtataaggataataaccgtacagatagagcgtgtcctgccgggcagggtagtacacttttgttccttccggctgcaaactcagttgtccgccctctgcatattgatagggaagattctgcaagtatggggtgctgaaattactgtctctcatcaggaatatacctatttcatctcctgtattcagggccgtgccttcaatgacgctccggccgacggtagtctctacggtgcataccgatgccctcagccgcacttccacagccctctccccgtcatcgggaagaggaactgtggcagtgtctgtgtcgcatcctgccaataacaggaatgcgaggccgaacaggtacgatatgtttttctttttactcattacacttcttctgtttttatgcgggtgctttccgcctttactctatgggtacgtctacggagtcaccgcccggtttccaggtagctaaagtggcggtagcgttgatttgttgggtggcgtagatgccgatacgtacgttgtagtaatagccggcatagaacaaattgtcatttttgcctgaatcgagggcgggagcgggagcattgacggggatgtcgcgtacaatcaggtcttgcggcactccactggcatcgggagccatgatggtgacgtccatcaggaattgttccatgtccggtttcaccatcagatagccttgtatcagcgggttggcgcttgacacgccgttaagcgtatattgtccgccttcgtatttctggacataaatgtctttgggaacttcgacggttccgtcggcattgtcgtccgtaaaagtaatattgcctttgccgtcgtcggtggcttcccgcataagcagggaaccgttgtcggtaaaggtcagtttcccggtcagaacgttgagggtggccgttgtgccgtggcttttgatggtgatattcttcactttcatgttttggacggctgttctgtcctcttcggactgctcggtggcgggaatcacggagaaacgcaactgtgccagttggtgctcgaagttgatgttgggtatccacggatagtcctgtaacttttcagaggctgtccggttcagttcgtggtgatacttcaactggcggatgtattgggctttatagccggtcagggaagcatcgttctttacatcctttttcaggtaaatgctgtttggcgctatctctccggcggtggcattgttccagatgatgtcctgcgagccgtcgaaacgggcgaatgttatttccggctttgcggcacttatggtttggccttcctgataaggggcgtagccgtagaagctatagtcgtatttcttctgcatcgggtagtagtacacaccgtttgcggcgttgcctttatataatgtgattttctgtgccaggtcattttccaaaccgtccggctttacgtcggagccgtcttgcttgggccaggcggttactgctgcctgtatattgttcagcagaattccgtagttctccgtatcgccccatgctgcggttctgttggcatcggtaatggcggtgctggttgtagcgtcattggtggcaagggcgaaaatgcccaatcgggtagtagcgccttctgcctcatcgtatagcttatccagcggtgcgcgtgttacgcctacgctggctcctatacgtgtctctattccacccaattggatgattagctgtccgtccggcgattcgaagtcgttgtcgctgaccggttgctctattacgatatcctcgttttgcgagcaggctgtcatgcaaagggcggctgccagcatccataaattctttttcatgattgtagtgagtaattggttaaacatatcgttgctctcctatgttcctcggtatggtacttccggtaccatgctttggtattccttgtaccaacgtttggtagcttccgtaccaacagttggtagctcctgtaccatgctttggtatttcaagtaccaacggttggtagttctcgtaccgcccgttggtagttggattgtcctcaggagttattttccgatagaggagccggttcttattttccgtcttcgatatcggtttcaatgtcaccaccgtcttcccatgcggtcagcactgcggtaacctctatcttttcgaagccatagattgtaatgtatacgttgtaagaagcaccggccttgaattctttcacatcttttgaaatcttggactgatcgatgattaagggagtatccagcttctcaacttctttgtatgtaatcttgtcaccgtctgtttcgtcttttgtatcttctacgtattgtttaaggtctatggacaagctgatgtttccgttagggaaaaacattacaggttcacccacttgagttcctttagcgtcggggtcactatctgccggaatattttcgtggccgtaaggatacttgggcactaccggagtgattaaacctttgtccgggtctaacttgtttttgttatcaacatctttactgcatacaacaaaaggagcggtggaggctccgtttcttgcggaagtcgtagtagccagatccatgtcgacaacatttaccatgtctttcaaggtaatcttagtaacttgcataccgagtgtcttatcctggccgtcagtgcttttgcgttccacccaattgctggcttcatatttatagccggctgcgctttcactgcctgcccttacgaaaaacttcaaacgagccagctgatggttgaatttcaggacaggaacaatgcctttacgggctgtacgggcgccgaactggtatttcataagttccgtccactcgccgcttagcgtggtagctatgtctttatataaactttggtcattggaagcatcgttctcggccatatctatggtactggctgccaataggtcttgagtaccgttgattgttacattcttcactttcttctcatctgccgtaatggttgcatcatcgtgggttgcatcgtcaacatgataaccgtagaatgtataggtgccgttggtcgggtagtatttgtattgaatcacgccgttgtcggtatcttctacataattgttatagattctgattgcaccgttattgccttcggttgctttgggggctctgaactggagagttgcgttatcgagaatcggagtttttgctccttcagcaccttcttcggcttctaagccggtggctctgtctaccatgtggatatacagttgttggctgttccacttgttgttctcgccttctacatcgcccacagagccggttcctctgctgagggccgtaaccgtgggtacgtccacgcctaatgcaatcactgccttgtcattgttgccgtccggattaccgatacccggatcattgtcctttgaacagctgctcattactgcgagcgccattgctgcatagaaaaattgctttttcatacttcattgaatttttaattaataaaagaaaatatataaatctctgtctgtctcaattttattcttctcctatctctatatctccaccgtttacccacgaggcagcctgtacattcagctttatatcctgcggaccgtatatataggcgctgatgttatattcgcgtccgcccataaatccactggagagataagcgccgttttcgtctttattgtacacggcatcctttaagtcgtagctgaaagtcgtgatatagggttcactcccggttgcgtcgggataatataccgtatttataaggagcgtggcattgttgcccggcggcagcaggaaaaccccgccgtctgttgccggacgctggtttacttccttgtccgcatcttcttcccttacttgcatcggatagagtgattttccttcttcatcggtccatgctatttcttttccctctgcatcacgtgccggtaatttcccccgttctccctctgtggggaaatggacgcctacgtttgcagggtcggacgaggctacagtgaaaacgcctttgttgacgcattctatccagacacccgtgatgtaaacgatgtctttcgtgcttttactggcaggatagaattttaacttgacgtatgaaagctgatgcttcatgcggattatgggccagatgttgcggcgtgccgtgtacgtgccgtaatagcagctgcgcatgagctggcgttcgtcggcgccgagctgtttcaggcgggcagcctgttcgctgtagtcggcagctatctttcgtccgttttccacgtcttctatcagcgctttgaggtcggcggcagcggcgcacatcaggtcttgcgagccgtctacggtgacatcgaaacagatacggtctgcttcgcgcttcacttcgcccacttgcgcatcgtcgtagtaataagcaaagaagttgaaggcatcgaattcttcctgcaaattgtaataggggatgtagccggaacttttccagttaatgaacgagccgtttcctgcataagccgcccgtttgccgtgcagtttgcattgctcggcggtgagtcccagtgccgtgcattcttcggcggagatttcgtccagactgccgtcgatgaggcaatagcgccggtcggcatcttcggcccggcgatgggcataggtcattccgttgggattgtcgcgccggaatgcgtatacgaagaaagtgccgtcggctatgcgtttgctgaagtttgtttcgtctgtgggatccagcactcccgtaccgcgtgtcaatacattatatatagggtcgctgaatgctaccatgacgggcagttgcgtctggtcgccctggttgtcctgatgattggggtcatagagcgactcgtcgccggtgtacagattaccgcaaccggtaacaagcagcagtatgcaccataacggcagaataagtttgtgccggtgtctccgcttttgcatgctattgctatatgtcaggcgtttcatctttatatctctattattatgtcatcgtccggattggtgggatcgtgcggttgccatcccatgccggtatcgttgggtactatctggtcggcctttattactaaaggcgttgtgatttcgatgtttacatcttctttgctgtaacgcaggtatattttgccgtcgcgcacttcaatgagttgtgctgcggtcagttcgtcatagggattgatggcgccgtagatgtagcggctgtttttcacgggattgccttcctcatccactaccggtgtaccggaagaatccagttggggagtagatacctgcaaggcaacttgcaggatgcccggtccgttgagatgtccttttgccgcgctggggatgacaccgagggtgtggaaatggaccacgcatcggtaagtaccctctccggtttgcgtaaactcgtccggttgtacctgatgtgccatccggtagaggcgggtggtgtccagacaggcgtcggcgatgttgaagcgtccgcaagcgccggacaattcgatgatgggcgccgcgaggtcttctctttttatgtttccttcggtgcggatattgaagacgatattgatacgctggctgatgcgttgcatatcaaaatccaggatggtcggttgtccggtttggatgtttatgttcttttgcaccgcatagaatatgggcgactttatttcctgcaggtattcatcgtcaggattgaaatcgggcaggtcattgccctctacgatgtcgggcttttcattgcccatactgctgatttgcagataaaggtctttcacgcttaccttattgtcgtggatgtaattgtccagattttctatgctgatgatgggagtaggggactgctccgtatcgcctgtctgtgccggaacatccgcatactgctcgttgatgataaaaatgttgtactcacctccgcgcaagtaaaaagaagaagcggtttcttccggactctctattgagttatcttccgaattttcttttgtatttgaagctgtccgggtgtcggaagacgtttcctgttgcgttatattattgtttgtggcagggtctatggatgtgttgatgatgccgcgggtgcgccaggtgtttatgatacggcttgctacgatgtgcatttctgccggaatctcatctttgctgatgtcgccccagttgagccgtacacgcatgtcggtgatgtgcggatgtcccgcttccggacagaggtctaccgaggtgcaggcacagatgcagcacagcaggctgagggcaaggtatgtcagtgtcttgttcttcatcctttatcctccttttcatcttcttcttcaccggaagcatctcccttttctttgttggcggcttccgcttccggctttccgtcttttttccggtttttcccggagtctttatctttcttttctttggtatgcagtttggctttcctggctgcacgtttgccacgtttggcagaatcttgtgttttggctttctgcttcaattggtcttcacgtactttcagtgccttgcgtatggtcttttcctgttcggaagtgagtgtatcgctaagttgtatgcccagagaatcggctacctgtttgcgcagtttgtcggcagcttctttcaaagcgagttccttgcgctcttgctgcatcagcttccattgtttcagctcttctttggtaagcaggctgtccgggcggctgaagccttgtttccgtaccgcattgttgatggagtcgatgcgttcgcgcatcttatttatcttttcattaagtgcctggcgggcgaagtcgcgtatctgtacacggcggtacaccgattccttatacttgctgcctgccgacatgaaccggtaaacgaaagctacgcgtaaatccgttatcagagggaacggcacgatgtgcccgcttttgcatttctccgctatgcgcgggtaacagtcgctttccgcatcgtgcgtataaacatcgtatgaggtgtaaagcagtccggcggaacctcccaactccaggtctatgtaattgttacggtagccgtaaagcggagcggtatatcccacgctgatgccggccccgtaggcgttaccctgcttgccttccttaccgattttaaagttgtagctggcggcgttgacatatacgccccagtagtaagcgcgttcctggcgcggattcttgcgctgggtggtgaatacggtttccttgagacgtgtcatcagattggcatctttggtgacgccgcctcttttacgggtgcgaaaatactgacgccactctacccgtgcatcgaatacattgaaaataagggatggggtgtacttttgcgaggtgttccagttccactttatattggcaccgattgtacgtttgttccggatggtattgcccaagtcaaattctacgccaatattaggaacggtcaataaccagtcaacagcatttgtcttgataccccaacggtctttgaaagatattaattcggctttcgcatcgtctttcttgccgcgttgcacctgggcatatgtgttattcaaagttattgatataagaaaacacactacaagttttctggataaaaaaaagtagtgcttttttttatactcttgtgataaaatcactttctttttaatattatttgtttgtttgcgatgccaaagatatatattgtttgtataaaaacaaaacttgtcattaactttcttttatttatcagaccttttttaatgtaatatatctaaatagcgttttgattggataatttttcaatgcttctctgtaattcgggtaggtatggtataaaaaaaggtgtaagtttttcccaacgggacttacaccttcttatctgaaaaaataataattattttcctttatgcctgttcgctcgtttcctgcggatttcggctttcattttcgccgcaccggaaccatgcaggccggtgatataggtctttttcttggctttggtcttgattttgttttcttctttaggcttctctttcttgcctttgaaaacaataccgcccatcattgcttcttctatactcacgttgttgatgtattaagtaattaatagtaatcctcttgttgcaaagtatgccgtacaatttacttggcgggcagtatctcaatccaataatcatcggggtcgttaatgaaatagagtcccatggcggtattttcaaaacatacccagccgttttccttgtgatattggcggattgcatcatagtctccggccacgcggaagcagagatggctttcgttctcgcccagttcgtaggcttggggatgttctttcaggcaggtcagttccagaagaaaacccgtgctgccgtcggtgagatagaccagtgtgaaagagccgtccgacgactctttccgatgatgttccttcagtcccaatgcttgttcgtagaaagcgatgctgcgttccaggttggtgacgtttatattaaaatggtcgaatttgctttttatttccactgttgttacttttttaggtttatatatcggtttatttaatttttgctttcaggatttcgccgatgtatgtacgcggcataccttctatcggggcttgtgacggcactttcttacattccagaatgacggaaggctctgtctgtccgttggggtagaagcgtacggtataattctgggccgcttccatctgtgcataaggctgttccggtgacagaatggtgaagattaccggcttgttgcctgctatcttgcctaacgagccgccggcattggcagtcatcatcgtcatattgaaaggttcttcgccaatcacaatcaccagcttgccgttgccggtctggatggcatcggcgggaaccgcatccggagctacctctttataggcgcttggtacagcctgtacattggtttgcggtgtggcggcaaccgtaaccgtagccggtgttgtagcggtggccttgggagtttctactgtaacttgcgttttgggggcaattaccgttgtacccgaattgacgagcgcctttgtctctttcttttcttctttcttttcctctacaggagcttgggcggcggtgctggcgcttaaggcttccgttacctcaatgcagagggcatcgacgaagtccacagtctttctgcgccatttggcaagtccgcgcaccagtttggtttgagacttgttcaaggcgtacttgtcggtaatccattcttcggcggtatatttctcttttccttcgcggtagttgaaacgtatcttctctacttcaaaaacacatttttccggttggcaggtgacggtgagctgataaagaattttcgttctgtccagtgacaatgcggtggagctgaacacaatccattcgtcgccgatgcctacaatctgtcctttctccttgtcggaaaagactacgcggctgttattcccgttctttgccagacgtgcatccatccacctcaacaggcgggagtagattgtgtcttgagacattccggggatactgaaatctttggtgaatactaccttgccgtccacttccggaacagcgccggccagatatttactgtcatccctctgggcatgcagcagggcaggcatgcaaaggcagaacagcgcaataagaacctgtgttaaatttttcataatgctatgttttatttagtaatgtcaaaactctcaccccggcaggagattgtaaggaaacggcaaccccggctttcggcaaaggtgcggaaagcgttaccgccccggtaatcctcaccgaagtgcataggtgcaaatatagcggtttttatccgttccacgaactgttccgcaccgcgcatgtaatcttttccgatgcggctgtccaccggaaacatggctatatctacccggggagccttttgttgcaggttctttatctctgcaagaaagtcgccttccgccttgcgtatctcctgcggagtagactcttcgctccaatgccagttgttcaggtcgccggcatggaacaggcggacgccttgcaaatctatcaggaaagagatgcctacatcggtggagccgaaggcttcgatacggatattttcgtcttcgtagacatcccccttatttatgtaaacggcatcttccgccgtggcacgccggtgtttcagaatatctttggagaagatataccggatatcgggccgctgttccttccatgaaaggatgtcgcggttgaaatggtcggggtggaaatgcgaggaaagcacgtagagcgttctcggcttctttagcagatggtcgtgtacgatcccccggtccggcgcctcttccgaggagtctttgtagtaatcgataatgaccgttattccgtccgcttcaatcgcgaagccgctgtggtaaatataatcaagtttcattgtacggtttcaattatagcgcaatattacaaaaaacaccacacaaacttccggtttggctgttattttatgcaaaagtcctacatcgggacttcaatcagcaggatatgcgaatcttgcagcgtttccaactcaaaactgtcggtttcgtatactcccataccgtcgcggcgggacagcactgtgccgtctacctttatttcgccctctatgaggaagatgtacacgccggcgtgcgactggtgcaggtgatatcccagcttctttccggcctcgacttctccgatggagaaccatgcctgttgcagcatcccggcaggagcattgccgtcgggcgatacgataagcgaaagcttgttcttgtgcagatagggacggatgtcataatcctgataggcgggcggggtattcagcttttcgggtattacccagatttggagaaactctgccggttcggtatcgcttccattcatttcgctgtggtagatgcccgtgcctgcactcatggtctggatgtcgcctatggtgatggtacggctgttttgtttgctgtcgccatgcttcagcttgcctttcaggggaatggagatgatctccatgttcttatgcggatgggttccgaagccttttcccggagctatccggtcgtcgttcagaacgcgcagggcgccgaaattcatgcggcgggggttgtaatacttgtcaaaactgaatgtatggcggctgtcgagccagtcatacgaagagcgtccacggctttcggctttgtctgttacttttttcataatctgtctttttagtggtttatctgtgtgtaacaagcaggcgggcctgaaagtttgagccgtggatgattaatgttctataaacgcttttttacagtctgacctcgttttccagtttcttgtgttccatgaagtcctttatattcatcagggtagtggatgcgatgttggcaagggcttcacgcgtgaagaatgcctggtgggaagtcacgattacattattgaatgacagcaggcgtgccagcgtatcatcgtcgataatcttgtccgaccggtcttcgtagaaatattcgctctcttcctcgtacacatccagcccggcagaaccgattttcttgtttttcagtccttctatcagggcattggtatggatgagctgtccccggccggtgttgataatcattacgccgtccttcatcttactgatggagtagtcgttaatcaggtatctggtctgctccgtgagcgggcagtgcagggagatgatgtccgagctgcggtacagttcgtccagcgtggtgtataccacctggtgctcgcgggcgaaattgtagtcgggatacaggtcgtaggcgaggatgttcatgccgaaaccgcgcaggatagcgattaacttcttggctattttacctgtgccgatgatacctgccgttttgccatacatgtcgaatcccaaaaggccgtgcagggagaagttgccgtcgcgtgtgcgccaggtggcgcggggtatcttccggttgagggagagcatgagggcaacggtgtattccgctaccgcgtaaggggagtaggcggggacgcgcaccacggtgatgccgttttccgctgccgctttcaggtctacattattatatccggcgcagcgcagggcaaggagtttcactccgtttgccgccagttgccggataacttccgcgtcggcagtatcgtttacgaagatacacacggcatccacgccctgcgtcagtatcacgttgttcaggttgaggtgtcctttgtaatagcggagttcaaaaccgtatccgctgtttttttcattgaatgaagcctcgtcgtagggcttgctgccgaagaatgcaatagtatatgccatgagattttaagttttggtgaatattcgcaggttattaagtgtgcatgacggatgcgcttcgtataagtgcactttctgcatttgttaaaaggcggcatgcacaaagaatataacgtgcgcaaaggtaagaatgttcgggatatatccggcaggttgtgcccataatctgttatccggatgatgagtgccggcgatagcaagcgctatgttgttccgacacggagaaagttttgttccgtcatggtggaacggaactttctccgtggtggaatgaaatttaccccatggtggaacgatttggcatcggctgcttttccctttgggcataggggcagtatatgcaagcggcagggacggcaaatggagcaatcccttgtctgtttcagcatgaatattggtgaatgtttcagtagaaactgttgattttttcaattaaattcttcggttctcctaaattaaatgcgcaaaattgttatttatgtgcaatattattgtacctttgcgcccgaaaacaataaaaaagatttagatgagaaaaatttctttgattagcattgcgatgttaatcgtttcaattccaacttttgcaggaggtctcctgacaaatacaaatcaacaccctgcctttcttcgtatgctgtcgcgtggcgcaaacaccaccagtgtggatgctgccttgtccaaccctgcgggtctggctttcctgccgaaagacgggttttatacatccttgagtattcagagtgcgttccagacaagaaatatcgatgcttcgtgcgaggctttggggctggacaaatattatgaaggcaaggcttctgcgcctgtcattcccagtgtgtttgccgcttataagaagggcgactggaccatctccggtttcttcggcattaccggtggaggcggaaaagcttcgttcgatgacggcttgtccatgttcgatgccatggtgataggcggattgctgcaacagggtattccgggcaaagcctatacactgaacagctacatggacggcaagcagtatatctactccgtgcagttggggctgacctataagataacggactggctgtctgcctttgcaggcgggcgcatgaactactttacgggtggttacaaaggtgcgctgaatgccagtgcggccgttgatttgcctttgcccaccggtggggcgatacccgttggaaccgagcttatcggcatcgacctggattgcagccagaccggttggggatttactccggttatcggtttggatgccaagttcggcaaactgacgattggtgcgaaatacgagttcaaggccaatctgaatattgaaaataacacgaagataaattcgctacgtatgataggcgctcccgaaagtgagctggaggactacaaacacggtgtaaatacgccgaacgacattcccgccatgctttcggtggctgctgcctatgagttccttcctgtgctgcgcgcatcggtggagtatcacttctacgacgataagaacgcaggcatggcaggtggcaaacagaagttcctgacgaaagggacaaacgagtatctggccggtatagagtgggatgttatcaaaagactgaccctgagcggcggtgtgcagttcaccgattatggtttgtccgatgactatcagagcgacacaagtttctcgtgcgattcctactcgctgggtgtaggtgcgaagttgcagctttcggaaagagccgatttgaatgtgggctatatgtggaccaactatgaggattataccaaaaccggtcaaaattatcagggcacaaatctgcccggtacaaacgtgtacagccgtaccaacaaggtattcggcctcagcatagactatcgcttctgatctttcataatcctttatatacgtaagagaggatgtgtcgcaaattcggctggcacatcctctctttgtcttatgcctttagggcttttatttctttccttttacggatttccgtgcaggtttcagaaggaatattgcaccagcaggttcatgcggttggcatggttggtggaattgtcgaagttcgtacgccagccgcgcagatactccgcacctacctgcatgtttggggtgacattccagaacaggtttgctacgaaatattgtccatagcggtaagtggacggttcgttggcaggatacccgttttcggaatagaggcgtgacatgctgtatgtgcttgaaaggaacactttcggactgatgttgtattgcagtccggcataccagcccagcatcggcaatgcttgcattttgcctgcttcatcgggattgggaacgatgtccacgttcaggttgctgaggtcgttcaggtattgcccgatgcctttcccgtaggtggcttgcccgaacacctgccattgtttgcccagattgaaggtggtggatgcctgtatgccgaagccggtaacggcatgcgccttgtcgctcagggtgctggtgtaggtcatgctgcggataagtccgcctacgcgcacatggcttttgctgttccagccgtactgcgcataagcggtgaagtcgggcatgcgctgttgtgcgatgtcaagctcgttgttggttgtgccgtctaccgcaggcacttcgacagaggcgttgaaacggaagtttttcagccctttgtaggtgtatgacacttgggtggcgcggtaaaaggtggctccgttaggcccctggaagtcgatggtggaaggcattgcgcccaggtccatgaagccgccgtaggtgtagcctaccgtcacgtcgcggaaagacacgtaggcattgcgcagttggaagcctttgttggaaccgttgcggaagttgccggcggtgtacaccacgaagtcgccgagaatcttggtatgccccaccagtttcaggaaaatggtggacgtgctggcatccatttgaaactggtttctgattttgctcccgttggggatgtaggcggggataaagtcgatgttgtcgacgatgccgccgaagtcgtactctgccgtggcgcgtacatagccgccgatgcccagggcgaacttcccttttctgtccgtcagcaggaagcggggcgcctgcggttcgtggatgtagggcatttgcgactcgttcatgatgcggattatctcgtcgcccgctttgtctatggtgaccaatacgacacctttgggagactcatcctcgataatcacttttttctgtgcgtggactgcgagggcagacagtgccgcaccgcacaacagaaacattgtttttaagattgttttcatttaagttaggttttggtgaatgtgctttgaacaacttaaatttaaaatggttttgcagtcatcggaagaaagcgtatctttgcacccgatttaacaagagtgaaatcattagttacatgtatgatgccgcgaatagcggtcgtgtattctagaacaccacgtaaaaaacaggaatatgaagcaaaaagtatctgtaccctttatgctgctgggcattctgttcaatgtctgtctgatagcggccaatcttctcgagacaaaagtaatccaggttttcggcattaccgttactgccggactgttagtgtttcccgtttcttatatcatcaacgactgcattgccgaggtgtggggcttccgcaaggcgcgcctgattatctggagcggcttcgccatgaacttctttgtggtgatgttgggactgattgccgtggcactgcctgccgctcccttttgggacggggcgccccatttcaacttcgtgttcggtatggcgccgcgcattgttgccgccagcctgacggcatttctggtaggttcgtttctgaacgcctacgtcatgagccgcatgaaagtggcgagcggcggacgtcatttttccgcacgtgccatctggtccacggtagtgggcgagacggccgattcgctgatattctttccggtggcgttcggaggcattatcgcatggcaggaattgctgctgatgatgtgcacccagattgtactgaaatccatgtacgaggtgataatactgccggtgaccatccgggtggtgaaagccattaaaaggatagacggtagcgatgtctacgacgaggggatttcttacaaggtgtggaaaatcagtgaaatttaagtagtagaggttgtcataaatatataataaggtgaataaagaagcagcattggtcgtattcagcggtgggcaggattcgacaacttgcctgttttgggcaaagcgtgagttcaggaaagtatatgcgttgagctttctgtatgggcagaagcatcagaaggaagtggagcttgcgcgggagatagcgcgtaaagcggaagtggagtttgaagtaatggatgtttccttcatcggcaagttggggcataattcgttgacggaccccgatatggtgatggaccgggagaagccggcagacagcgttccgaatacctttgtgccggggcgcaacctgttcttcctcagcattgccgccgtctatgcccgcgaaaagggtatcaaccacatcgtgacgggtgtgtcgcaaacggatttcagcgggtatcccgattgcagggacgcatttatcaaatcgctcaacgtaacgctcaaccttgccatggacgagcagttcgtactccatactccgctgatgtggattgacaaagccgagacttgggcgctggcggatgaactgggagtgctcgacctgattcgtcatgaaacgctgacctgttacaacggcattcccggcgacggctgcggacactgccccgcatgcaagctccgcagagaggggctggagaagtatctggcgggaaaatgacgaatgtattataccacaaaggaaacagaaccgattataaaccgattgtaatatgaccgaattaaaagaccaactttccttattaggaagaaagacagagtacaagcaggattacgcccccgaagtgctggaggcattcgacaacaaacatctcggtaacgattactgggtacgtttcaactgcccggagttcaccagcctttgcccgataacgggacagcccgattttgcggaaatccgcatcagctacattcccgatgtgaaaatggtggagagcaagagtctgaagctctatctcttcagtttccgcaaccacggcgctttccacgaggattgcgtcaatattataatgaaagacctcatccgtctgatgaatcccaagtacattgaggttacgggcatcttcaccccgcgcggcggcatctccatttatccctatgcaaactatggacgtcccggcacgaagtacgaaaaaatggcggaacatcgcttgatgaaccgcgaatagaatggtggaatatacctatcaatagcgattgcgggtgtgatactttcttagcatggcgtcggtataattacctaaaagaggtgattgtgaggttgcttttttctaatgacctttgcatacggtattagtaacaacttaacaatcacttcaaattgaaaacagccatatttagtttattatttttcttcttgacggcatgcgcctttcctgtatatgcgcagagaccgggcaagacgatgatttcgggtaaaatcctgtctacggagaaagaagtcgtggattttgcaacggtctatctgaaagggaccggttacgggggaataaccaatcaggaaggtatctatcatgtgagtgcgcctgcgggcgactatacgctggtggtgtcggccgtcggctataaaaccgtagagaaaccggtgacgctggtcagagggcaaagggtgaggcagaatgtcacaatcacccccgaaactcagcaactggacgaagtaacggtggtgtcgacgggcgtgagccgtgtcaagcggtcggcattcaacgccgtggcggtggatacgaaagagttgcagaacactaccagaaacctgagcgatgcactgaccaaagcgccgggaatgaaactgcgcgagtcgggcggggtagggtcggacatgcagctcatgctggacggcttcagcgggaagcatgtaaaggtctttatagacggcgtgccgcaggaaggcgtcggaagctcttttgcgctgaacaatatccccgtgaattttgccgaccgcatcgaggtgtacaagggcgtagtgccggtgggattcggcacggatgctatcggaggggttatcaatatcgttacgaacaagaaacgccgccgctggtttctggatgcgtcctactcgtacggttcgttcaatacgcataagtccaacgtacacttcgggcagaccttcaagaacggttttacgtacgaaatcaacgcgtttcagaactattcggacaatgactaccgcatcgactccccggtggaggactttgaaacgggcaggatagaccgtgacaagaaggtgcgcgtacggcgcttcaacgatacttaccacaatgaagcggttatcggcaaggtaggcgttatcgacaagaagtgggcggaccgtttgatgttcggtttcacttactccaatatgtaccaggatgtacagaccggcgtgcggcaggacatcgtgtacgggcagaaacaccgcaagggacattcgctgatgccttcgttggagtataataagcgcaacctgtttgcgaagggactggatgtagtgctgaccgtcaactataacaagaacctgacgaccaatgtggataccgcttcctataagtacaactggtacggggaaaggaagccgctgaactctcccggagagcagtcctaccagcactcgcgcgccgacaacaataactggaacggtacgtttacagccaactaccgcctcggcaggatgcacacgctgacgttcaaccacgtgctgaatgctttcagccgttccaatacttcattgcttgccaaagaagagcagtcggatgccattgccaaggagacccgcaagaatatctcaggtctctcttaccgcctgatgccgtccgaagactggaacttatccgtattcggcaagtattacaaccagtttgtcgccggacctgtggctacggatgccaatcagaacgactatgtgcgcaccacccacagcgtacattccgtaggttatggagcggcgggcacttacttcatcctgccgggactgcaagccaagctgtcctatgaaaaggcctaccgcctgcccaccatcgaagagatgttcggtaatgaggacctggaaatgggcgacatcggcatccggccggagaacagcgacaacatcaacctgaacctgagctataacaagactttcggcaaacattccgtgtacgtggaaggcggctttgtctaccgtaataccaaagactacatccagcgcaacatcaccgacctgagcggcggcaagtccgcagccacttacgtcaattacggcaaggtgctgacgaaaggatataacatctccgcccgctacggctttggcagatggttgagtgtgggcggcaacttcacgcagatgaacgtgtgcgacaatatgaagacgtccatatccggcagtgcggagaatatagcttataaggaacgcatgcccaacctgccttatatctttgccgattccgacgtgaccttctactggcgcgacctctggaaaaaaggcaatgcgctgaccgtatcttacgacaaccagtacttgcatagctttacctattattcttccaaaatcggttcgaacaagggcgactacgtggttccgagccagttctcccacaacctgagcctttcctacagtctccgtagcggacgctacaacctctcgttcgagtgccggaactttacggacgagcaactgtacgacaacttcagcctacagaaagccggacgggcattctatggaaaggtgcgcgtatacttcggcaattgaaaccatgaatcaataacgattagtgtaatataataaaacaaaacaacatgaaaaagaatcttttatcagccgtacttctcacttctgcgatggcaggaacggcattgacatcctgcacggatacggaggtgccgggcggcggaaacaataatggaaccaaaggcgatttcgtgatcgcttcctctgtcaccgcttcgagcaatacgactaacgtattgctgacttccaggactttggacgaaggctctgtttctaccatcaacaacggactcgtcaacgacggcgcttcccaatgggtattctacaagaaccggtatctctatggactgacttacaatcagggaaatgccggaaccacccgttcttatatcatgaactccaatcacgaagtgcaggcgcgctcgggagagtttgcagtgaagagattcactacctacggcatctacgataagtatatcataaccgcctctaccggcgacggacctgcggagtatgccgacggtaacctgtatctgcctaaaaccttcctgctctcttacctggatgtagcggacgaaaccttcaataccaacgatacgaaaaacaaggcctaccagtccgagaatttcctgggcaacggcgagttcgtgacattggccggtattcaggagcataacaacaagatatacagtgctgccgttcccatggggctgagccagtatggcgctgccgtagacggcggtaagtatatattgccgggcaatgaggatttggtaaagaccgaagacggcggttccaacagcagttcgtataagaaaggcgaattacagtggacacagtatcccaatgaatgctgggtggcaatttttgatgatgctacgatgacaacgaagaaacttatcagtacggataaaatcagttatgcctgcggccgtttcaaatcccagtattaccagactatctgggaagccggcaacggtgatatttacgtattctctccaagctatgccaagacgatgaaggatgcccgccagcagacaatcttgccggcaggtgtggtacgcatccccaatggccgggaagacttcgacagctactactgcgacctggagaaacagagcggcggaaaatccttcctgcgttgctggcatatagcagacgactatttcctgttgctgatgtacgaccgccctctgacggagacgggctttgaagccaaagaactggcggtgttcaaagcggaaagcaagaaacttacctatgtcaccggtcttccgtcggcagacctgatttccggcttcggcaacactccgtatacggagaacggttatgcctatatggctgtgactactaccgacggccatccggctgtttacaagatagacccgtccagcgctactgctacaaaaggtgttacggtagaggctacgcagattacaggtatcggcaagttgagccctcttagctgactgcaatgaagaaagcatttcgtaaaatacatctgtggctgtctgtccctttcgggctgattattacggttatctgcttttcgggagctgcgctggtatttgaagacgaagtaatggagctgtgcaggcgcgacctctattatgtggaaaaggtaagcggcgctccgcttcccgtggaatacctgatagagaaagtctccgaaacactgccggacggtgttgctgttacaggcatctccatctcttccgatgcggaacgtgcctgtcgggtcagtctgtcgaaaccgcggcgtgcatccgtttatgtagaccaatataccggtgaggtaaaaggcaggtatgagcgtgcgccgttcttcctcaccatgtttcgcctgcaccgctggctgctggacagcatgaagccggacggcggaatattctggggcaagatggttgtgggggtaagtacgctgatgttcgtgttcgtactggtttcgggcattgtcatctggtggccccgcacaaagaaagctctgaagaacagcctgaagattgtcgccgataaaggccggctccgcttttggcacgatttgcacgtggcgggaggtatgtatgtacttatcttgcttctggcaatggcgttgaccgggctcacatggtctttcccctggtatcgcgcaggcttttataaggtattcggagtagaggccaaacaagggacggggcatcatgatgccccgcaagcgactgccacttcatatacttgctggcagcaggtttatgaggaactgaaagaacgtaacgacggctataaacagattacggtttccaacggttctgccaccgtatcttttgaacgtttcggcaatcagcgggcttccgaccgttatacctttaatccgagtaacggcgaaatcaccggaaccgccttgtataaggatgccgatgcttcgggcaagatacgcggctggatatattccgtgcatgtgggcagttggggaggtatgttcacccgtgtactgacattcattgctgcattgctgggcggaacgcttccgctgacgggctattatctgtggatacggcgtatcggccgcaaggctaaagccgcaccgaaccgataagggcagctctttgctctacctataatttgtatctctttcaggccttactttgcctgcatccttttctccggacgtggctaaggttccggcagatatgttccccaccgtgaaacaaaccgtttcccggtggggaacaacttgtttcacggcggggaacggttagtttctcctgaggaaacttccgtttccatcaggggaaattattgttttcatcaggggaaaccgaagtttctccttaatgaaacgtttgttgtcttttatgcaggattgattatccttctgatttcagcctctgttccgcagaatggtccgtgtgtttgcagcttgatggtgcacatggcagcggcaaagcagcctgcttcccgataggatgcgcctttgttccgcatatacagatagcccaccatataagtatctccgcatccggtggcatccactatctgcagggcggagtaggcgggaatttcatggaactgtcctttggcatatatcagcgaacctttgtctcccaacgtcagcagcacttctttcacaccccagtctgcaatgagcagggcggcttcgtgaggctctttgcagccggtaaggacttccatttcggtttcgttggcctttaagatatggatgtgcttcagggcttctctcttttccggccagtctacgggcagcaccttttcattgtccaccttgcgcaggaacccctgaacgtctaccgatagcaggcctttgcccgacaggtatttgatgacgtccaatgaaaagtcgtcggcaagcaggctgcccaggtggataatccgtgcattgacgtcctgcaggccttccattgtaaacgggtcggcctttgccgtgacgcgttgcgtacgttcgttctggttttctccgtatatgttttcaaagcagacggaacgggcactgggcagagtctttacctcaatgccctctttccgtatgtcttccacaacgttcatctccgtgtgggcaagggatgtgaccaataaaaagccgttcgggtcgagatgcttgatggcatgcgcaaagtaaaaggaagtgccgcccggcatgtatatcgtgttcttggtggtaactatcttgtcttgtgtaatataaccgatgcagcataaatcgtgtacactcattgttccctattgttttgattcgtttatttgtaattttgctgcaaaggtaatgaattattgagaaaaacggtaatactttgtcagtccagtatcttcttcataagttcgtcatacttcttgtcgtcacctgccattaccttcagttgccgggtaagcagtttgaggtgaaggctttcgtccgcaatcagttttgtcagcagcttgcgggcaatgtctgcggttggtgtacttgcggtaattcgttccttcaccgacttgtagaacctgatagtggccacttccgaatgcgcggcgagggtgagcgcttcgacgggtgtttcgcctatattgacgttcttgctgtcatacggtttgggaagtgtaccgcccagtgctacgatggcgtcccgtatgtgtgcgtaatgcttcatttccaccaaggcgatgcccagcatcagttcgccgatttcatcttcaaagacggcttcctgctgggtatattgcaggatagcggtaatttcggaatactccgcattttctatggcaggatagaaccattcgggctgtacgccgtcattgggtttcatgtcatcgggctccacccattccacatcctggttcgaatactttagcacatccaccagggcatccgccattttatccacataattaatcatatcagttaagttttagagttatgtgggggacaacaatcggtaaaggcacttggtttggagtattttaaaatattcgggaatgtttgcagtatattcgtgcgatttaaccgtttgtggcgtttgttttgtgccaatgccggcaagataatcctttttaattctgtgcatatttatattctgtcggtgtcattcccgttatcttcttgaacaggcaggtgaagtgctgtgagtttgcatatcccagcttcctggctgtcatgccgaccgtataatccttgttccgcaacatcttcttagccatgtccagccgcatcagttgaaagtattcgtgcatgctttttccggtctcgaacttgagcaggtcgcggaaatagcaaggtgacaagtgaagagcgtctgcacaatattcttctgtgggcatcgcaccgccttccagtctgccggacaagatgtatccgttcagaagtgaatggattttgtgcagaattattttattggcttcgcaacgggtaatgaactggcgttcgttgaagcgcgcacaataatccagcaatagctcgatatggcgcgatatcaaagttttgctatggcggtctatggcatgccgaagttcttcttcgatattgcggatgcactctgtgattttcatcttttcgcgcgatgaaagatgcagcgactcgttcggtttgtagaaaaagaaggaatagtctccgatgtggttccccaatgcagtgtgcgccattaaatccggatgaaaagccagcattcgccctttgggggcaagcatattgtctatacccagcttaatggactcgcccggtatacggaatatcagtgtagcgttggaatagtcgtagtatttgcgtccgtacataagttttccggcttccccttctatcaggataatcgtatagaaatcacatcggatggtacgctgctccagattggtttcggataggtcaacgacacttaccagcggatgcagcgtcttgcagcccatacaacagttacactgatgtacggtctctatattcagtatttcttttttcataaggataatcttatcggtatcctttatatttgcagctttctgtattctccgggtgtgtatcccgtattcttcttgaagattcgattgaaatgctgcgaatattggaatcccagttcataggcaatctggctgaccgtcttttccgttcctgcaatcatctctttggctatgtcaatcattctggtctggatgtattcctgtgcgctttttccggtttctttctttatcaggtcaccgaagtagttgggtgacaggaacactttgtcggcgaagtattttacggaaggcagtccgtctgtttgcggtttgtcgctttggaaataatcgtcgagcaaggcttcgaattttaccagtacgcttttgttgctttccgaacgggtaatgaattgtctttcgtagaagcgcatgcagtaatccagcagcagttcgatgttccgtgaaatcagacgtttgctgtgcttgtcgatcggatgttggagttccattcttattttctccagacaatctgtgaatatgcttttttcttcttcggataggtgcagggcttcggccgaggcgtacgaaaagaatgaataatgtttgatgtcttgtcctaaagaagttcctttaatcaagtcggggtgaaacagcaggccgtgggcgttcggccgtactccttgcggcatgtccacctcaaccacctgtcccggggcaaagctggtgaccgttccttcctgataatcgtaaatctgccggccataacggatgtctccgcatttgacgtttttcaggaaaagggcatacaccccatagttcatcgtgaaatgcgttggaaatctggtggcttccgacaggtttaccacacttaccagcgggtgcagtgtttcgagtccgaagagtcggttgtattggtctaccgtgtccagtttaataacttctttcataaggtattgttctttagttctacgcaaatgtagagaataaaagcataggtagtacacctctccgcacagaaacagtaaataggttacaaatgtccgtaattcattcacacgagcgctgccgccattcgtttacatttgcagtgtaatctatgtaatattcagaaccatgacacttgataattttttagaatatgtaaagacacgaaaagcccttgacacggaagatatacatcgttttatggatgaaatgagcaatgaggcaagacgcatcacattcaaactgaatgcatctttccatgctccggatgaggtgagagcattgctctccgaactctttggaaagcccgttctaccctcactgcgggtgttcccgccgttttatacggatttcggaaagaatattgaaatcggtaatgatgtatttatcaatgcctgctgccattttcaggatcacggcggggttacattgggagacggttgccagataggacataacgtcgtttttgcaaccctcaaccacggacttgctcccgaagaccgccatacgacttatcctgcacctattatacttggcaggaatgtgtgggtaggctcaaattccactattctgcaaggcgtgacgattggcgataatgcggtggtggcagccggggcggtggtgacaaaagatgttccggcggatgcaatcgtagggggagtgccagccaaggttatcaaatatatccgataactccattcatcgccatgataatgattttggtaatacggtctgctttagtttgttctgtttttgcagaattaacccaatcaacgagcgcctttttctgaacgttactatatgcttcaatcttttcctgtgcgccctcttcatgttgcatacacaaaagtaactcttccgttatccggttcttttcaacctcatgatatagtaaacagagcatcatacagatgcttttcatgctttttcttgaaataatttaaagcaagtgcttatagtttaaaactttgtactatatttaaaattgaattacatccggtagagaaataggtttgtctttgttccggatgattatagggaaagagcggataagaagtgaaaaagaaattagtgaaaaagtatgactctataagaaagaattcaatagatttgctttgagaaaaataagtaaaatgagggctgaattatgaatatcatagaacgtatagacagaccttgtgaatatgtagaagtggcacagacagccttgattgcctgccaatacctatatttatggttgtttgccggaccggatgatgcctataaggtatattcgctggcaatcctgatggcatttgaatttgttatggtgcattcgggactttttatggcagctatgccgctcaaggcttcaatacggctgtttattccgttgtatgggctttttgcatttgcatttgggcattcaatgcgggagggggattatacaatcatcattctttaccttgcaactgtgctcaacagaatgcgtttcgcttttttcaatgtcagtaaatcggtcaagcagcgggtagtcagacaatcgatgattgccttggccgtttattttgtgttgacggtatcggtggtatgtgcagaatctgtcattccttctttcagcttaggaacagctttttccgaatcggcatcctatacccgtgaagtacgtgccggaggattgtttgttgaaaagccttatgtaccaatatgtctcggatttctgtattacagtgtactttctttttttaatttcaaaactgtatggcgggaacgtgctttcattaaaagaagatgcaccggaggctatactgaagaagtgacaaataagagacaacagaaaaataaataattatgaaaaatgcgattttaacaattgtgctgtcaggtatggcactattcttataataaagtggttgctcttgaaaagaaagacacgaatgacatttgaagcgttgtacaagtttgaagcagggatattgaaaaaaatcattccggtacttcacagcccggaatgaaagcataatgttacaagagttttatgaatgagagatcagaatatctttttaccttttttactaatacgttctaattaacactttggtttctatcttacaaatctactgtaggtttcaatgatagtataacaaagactgtgccaaaaacggtataaaaagataagtggtttaatatcagttatataatactgatggcttttgcgctattgtggaaaattatgctataattccacattaatattccacaattccacattaagatgaaagactattgttttctatcttgttgatatttagttttctatcttgtaattctaattttggcacagcatttgttcggaattttatgtcctaagatgtagactaactgaattattccaagcttatagttgtgtaaagttagtattgataatgtttaagagatagtgttctcgtaaaaatgttgtagtgtcgtcccggtgttgtgaaacatcgggacgatattgttttggtaagcagtagaaaatgaattgttatgggtattgggaataaaaagattctatctgaagtcagaaaagtcaggcaggtttcctcttttcggaatagcctcttgcgctttccggcaaggggtaaaagtcagccatccgttatctcggactattccgattattatgcgtttcaggtgctttttcacttgctcctaaaaggaccctgaatttgcacctggcatacttcgggtcaatgtaaaaacctgaggggtaaatttataaattgttatctttgtctccaaattcatagcttatggaattaaacggttatcgccttcttcttcctgaaggcactttagattactttgatcttgttgatgtgaaggaaagcgtaaatgaagttgtgatctaccttgaggagaaaaatatcgttcctgagaagtatacagatcaggatactgagagtaaaggcttttatgctcctgttattgttcaggattttcctcttcgtggcaagaaggtcttccttaatattcgtcgtcgtcgctggctcttaaagaagcataatgagtatatctcccgtaactggcgtatggtggctgaaggtactcgtatgacgcaggattttgcgtcttttttaaaagaactatattgatagctatccgatcagttgcaagctcttaggtgttttatatggagttgacggggatttattggagcgtcaataccgtaaccatctaagtggttatctccattgggaccaacttgttcatgcagaggattggctactattcgaaaagaatatcggtgcttatatctgtattgatgaggtagccctctcgcgtggggaactctatactgtactgaccaataaagaagctcacggtggtaaaggtagtatgattgccatcattaaaggtacggacgttcatacggtcacttctgtcctgcttaagctctcccgtcgccgccgttaccaagtgcgcgagataaccttggatatggctcctaacatggagcagattgcacgcatctgctttcctgcggccaaacgtgttaccgatcgctttcacgtacagaagttagcttatgaagctgtgcaggagatgcgtgtaaaagctcgctgggaggctttggatgaagagtccactcagattgcttatgcaaaggcctgtggaaagatgtatcatgcacctgttttcgctaatggagatacaagaaagcagttgttagcgagaagtatttatctgctttacaagaaggaatccttatggactcagtctcaaagaatacgggctgaaattcttttcaaggaatatcccgatataaagaaaggatattatctgtctatgcggttaggcttaatctatcatcagtgtaagtttaaggatattgctttgacaaggctggcaaggtggtatgatgaagtagataaatcagggttcctcacctttggaagggtcgcacgttctatacaaacacattatctggatataatcaatttctttgaaaggagggcaaccaatgccgcagcagagtcattcaatgctaaaatcaaagcatttagagcacagttcagaggagtaagagatagagcttttttcttatatagacttgctaaattatatgcttaaatataaaatccctcagattgttacgttgaccccatacttctcagaaacgctatattctgcttcacctcaaacaaacaaaaaagctctaattccgttgagaatcagagctttttctaattttgctttcttgagaagcggtgcgtacgggactcgaacccgtgaccccatgcgtgacaggcatgtattctaaccaactgaactaacgcaccattatttcattttatcgttgctatctctctcgattgcggttgcaaaggtaggtgttttttttgaatctgcaatagctgtgataaactttttttcaaggcttcttgtctgtgtttgctttttgttctcatatttaggaagttgtaaaaaataagagatgtaatgtttaacaaatatttagaattgttctttgcagcttgtttatgtcctgtttatatgttatttagtatgcgattagacgtcaatatatagagaaaacgaaacaattttcgctaacttttaaacttcttgtttgaaaagttcgttattttgcaataaatcgttatttttgcgaactcaagacaagaatattgcaattagagaacaataaaaatagagtttaggatgatgaaaacggcgaagctgttacttcactgtcccgatcagccgggaattttggcagaagtaacagattttataacggtaaacaaaggtaatattatctatttggatcaatatgtagaccatgtggagaatatttttttcatgcgtatcgagtgggaattggaaagctttctggttcctcaagagaagatagaggactattttgaaacattgtatgcgcagaagtacggaatgagttttcgcctttatttttcggatgtcaaaccgcgtatggctattttcgtgtcgaagatgccgcactgcctgttcgatctgctggcgcgctatacggcaggtgaatggaatgtggagatacctcttataataagcaatcatccagatttgcagcatgtagcagaacgcttcggcataccttttcatctgtttcctattactaaggagacaaaagaagagcaggaaaagaaagaaatggaactgcttgccaagcacaaggtgaacttcatcgtactggcacgttatatgcaggtcatttccgagaagatgatagacgcttatcccaaccgcatcatcaatattcatcactctttccttccggcatttgtaggggcgaaaccctaccatgcagcatttgagcgtggtgtgaagattataggagctaccagccactacgttactacggaattggatgcagggcctatcatcgagcaggatgtggtgcgtatcactcataaagatactgtgcaggacctggtgaacaaaggcaaggatttggagaaaatcgtcctctctcgtgccgttcagaagcatatcgagcgtaaggtgttggcgtataagaataagacagtaatatttaattagtagttgatgaaggttgcagttgtcaaatataatgcaggtaacatctgttcggttgattatgccttgaggcgtttgggcgttgaggcggagattacggcagatgaaaaggttctacgtgctgcggataaagtcattttccccggagtgggtgaagcggaaacaaccatgaatttcctgaatgccggcggaatgggcagactgataaaagaactgcatcagccggtgttgggtatctgtttgggaatgcagttgatgtgtcgccattcggaggaaggagatgtggattgccttggtatttttgatgttggcgtgaaacgttttgtttcgctaaagcatgaggataaagttccccatatgggatggaatacgatttcacagactgacagcaagctcttcaggggcttcacgaaagaggaatttgtctatttcgtacacagcttttatgtgccggtcaacgattgtacggctgccgtaacggattatatacttccgttcagtgctgctttgcataaggataattactatgccacccagtttcatcctgaaaaaagtggaagtgtgggcgaacgtatcttgcagaactttttggacttatagtgaaagaatccgatatttgataattcgtaattaattgaaatgatagagttaattcccgctattgacatcatcgacggaaagtgcgtacgcctctcccagggtgattataacagcaagaaagtgtataatgagaaccccgtagaagtagctaaggaacttgaagcgcatggtatccgacgccttcatgtggtagacctcgacggagccgtttcccaccatgtggtaaattaccgcacgctggagcagatagcttcccgtacttctttggttatagatttcggtggcggggtgaagagcgatgaagatttggtcattgcatttgaaagcggtgcacagatgataacgggcggtagtattgccgtacagaatcccgaacgtttctgtcactggttgcaaacatacggctcggagagaataattctcggagctgatgtgaaagaccataagattgccgtcaacggttggaaggatgagagtgcttgcgaattgttcccgtttttgaaagattatgtcgggaaaggtgttcgtaaagtcatctgtaccgacatcaattgcgacggtatgctgcaaggtccttccatatctctgtataaagagatgttggaagcgcatcccgacctttaccttatagccagtggcggagtgagttgtgccgaggatattcgccaactggaagcaacgggtatacctgccgtgattttcggtaaggcattgtatgaagggcgtataacttttaaagaactggaagcgtttatgatataaatttgcgtaacattgcattcattattgttgctcaacgtaaatcgagtcataaatccaaaatcataaataaaagaagagtgttagcaaagagaatcatcccctgtcttgacatcaaagacggacagaccgtaaaagggactaattttgtaaacctgcgtcatgcaggcgatccggttgaactggcgcgtgcttatagtgagcagggggccgatgagttggtctttctggatattaccgccagttttgaggggcgcaagacatttgccgaactggtgaagcgtattgccgccaatatcagcatacctttcaccgtaggtggcggaatccatgaactgagtgatgtagaccggcttctgaatgccggcgcggacaagatatccgtcaattcctcggctattcgctgtcccggactgattgacgagatagccaagcatttcggttcgcaggtttgtgtattggctgttgatgccaagcagacggaaaagggttggtggtgttttctcaatggtgggcgtgtggagaccgacaaagaactctttgcctggacaaaggaagcgcaggagcgcggtgcgggcgaggtgctttttaccagtatgaaccatgacggcgtaaagaccggatatgccaacgaagcccttgccgctcttgccgacagactttccatacccgttatcgcatcgggcggagcaggcgtgaaagagcacttccgtgatgtctttttggaaggaaaagcagatgccgccttggccgccagcgtttttcatttcggagaaattaaaattcccgatttaaaatcgtatctttgcgcccaaggagtcgcaatgagaagatgataaggagttataagttatgagttataagttattcgctgctgcacgaagcacggatgaaaacgactcataacaataactcacaacaaaataactcataacttataacttaaaaagatgttggactttgataaaatgaacggactcgttccggcaattatacaggatgctgacacgaccaaggtgcttatgttaggttttatgaaccgggaagcatatgataagacggtagaaacgggtaaagtaacattctttagccgtaccaagaaccgtctttggacaaaaggtgaggagagcggcaatttcctgaacgtggtttccatgaaagaggattgcgacaaggatactttgctgattcaggtacatcctgtcggtccggtttgtcatacgggtacggatacttgctggggagagaagaacgaacagcctgttatgttcctgaaacttcttcaggacttcatcgacaagcgtcatgctgaaatgccggaaggctcttacacaaccagcctattccagtcgggtgtcaataaaatggcgcagaaggtaggtgaagaagcggttgaaactgttattgaagcatgcaacggtactgacgaacgtctgatatacgagggagccgatttactgtatcatcttatcgtattgctgacctctaaaggttatcgcatagaagatttggcacgtgagctggaagaacgtcacagtgcggattggaagaaacactaagttgttatggatgaagtgctgatacgatataaagatgtggagatacaccagcaggagttgtgtgtgttgaacgatgtaaacttggagttacataagggagagtttgtctacctcatcggtaaagtcggttcgggtaagacgagtttgctcaaaaccttttacggtgaactggatgtggcggcgggcgatgccgaagtgttgggatatgatatgttgcatatcaagcgcaagcatattccgcagttgcgtcgtaagttgggtatcgtatttcaggatttccagttgcttaccgaccgtacggtgtatgacaatcttgagttcgtgctccgtgccaccgggtggaagaataagggagaaataaaagaccgtatcaacgaagtattgcaattggtgggtatgagcaataaaggttataaataccccaatgaattgtcgggaggcgaacaacagcgtatcgtgatagcccgtgctgtactgaactctccggaagtaattcttgccgatgagccaaccggaaatctggatgtggagacgggatttgccataacccagcttttacatagtatcagtgaggcgggttcgctggttattatgactacgcacaatatgcagttgctttgggaatatccggggcgcgtataccgttgtgccgaccatttgataacggacgtaacggagcagtattccgttgcgtcgtcaatagaagagaaataaacaagattatataacattttaatacagaaacgaaaatgaaagttttaaagtttggaggtacttcagtaggttcggctcagcgaattaaggaagtggccaaattgattaccgatggtgaacgtaagattgtggttctctctgccatgtcgggtaccacaaacacattggttgagatttcggactatctgtacaagaagaatccggaaggtgctaacgagattatcaacagactggaaacgaaatatcgccagcacattgatgaactttatgccactcccgaatataagcagaaaggtctggaacttatcaaatctcatttcgactatatccgttcttacaccaaagacctttttacgctgttcgaggagaaggtagtgctggcgcaaggtgagttgatttctaccgccatgatgaattactatctgcaggaatgtggtgtgaagtcggttttgcttccggctttagaatatatgcgtacggacaaaaatgctgagcctgatcctgtttacatcaaagaaaaacttcaggttcagcttgagttgcatcccaatgccgacatttatattacacaaggttttatctgccgcaacgcctatggcgaggtagacaatctgcagcgtggcggcagcgattataccgcttctctgataggtgcggctgtcaatgcttccgaaatccagatttggacggacatcgacggtatgcacaacaacgacccgcgtattgtggacaagacctctcccgtgcgccatcttcattttgaagaggcagccgagctggcatacttcggtgcaaaaatcctgcaccctacctgtatccagcccgccaagtatgctaacatccccgtgcgtctgctcaatacaatggatcccacggctccgggtacactcatctccaacgatacggagaaaggcaaaatcaaggctgtagctgcaaaggataatatcacggctatcaaaatcaagtccagccgtatgttgcttgctcatggtttcttgcgtaaagtgtttgaaatctttgaaagttaccagacttctatcgacatgatttgtacgtccgaagtaggcgtatccgtttctatcgacaataccaagcatctcaacgagattctggacgatttgaagaaatacggtacggtgacggtggacaaggatatgtgtatcatctgcgtggtaggcgacctcgaatgggagaacgtcggctttgaagccaaagcgctcgatgccatgcgcgacataccggtacgtatgatttcttttggcggcagtaactataacatttctttccttatccgtgaatgtgataagaaacaggctttgcagtcgctcagcgatgcgctgttcaatgagtaataaaagaaaacagtagatatgagcgcttttaccttcttgataaaagcgctctttttaactaaacgaagatataacccataataattatatgaaaggaacatttcctattgacaaattccgcgaattacgtaccccgttttattattacgatacgaaggtgctgcgcgataccctttcctgcatccgtaccgaagcgttacgatacgataactattcggtgcattatgcggtaaaggccaatgccaatcctaaggttctgactattatccgtgagagcgggttgggagcggactgtgtgagcggcggtgaaatccgtgcggcaatcaaggctggtttccctgccgacaagattgtgtttgccggagtgggtaaggcagactgggagataaatctcggattggattataatatcttctgctttaatgtagagtccatacccgaactggaaattatcaacgaactggccgcagccaaaggcaaggtagccaatgttgctttccgtatcaaccccaatgtaggtgcgcatacgcatgctaacatcactaccggattggcggaaaacaagttcggtatcagtatggaagatatggaccatgtgatagacgtggcgcaggagatgaaaaacgtcaagttcatcgggcttcatttccatatcggttcgcagatattggatatgggcgattttgtggctttgtgtaatcgtgtcaacgaattgttggacaaactcgaagcccgtcagatacgtatcgaacacgttaatgtgggtggtggactcggcattgattacggacatcccaaccgtcagcctgtacccgatttcaaaagctatttcgaaacctacgataactgcctgaaactccgttcctatcagacacttcattttgaattggggcgttcggtagtggggcagtgcggttcgcttattgcaaaggttttgtatgtaaagcaaggtactaataagcagtttgccattctcgatgcaggtatgacggatttgattcgtcccgcactctaccaggcattccataagatagagaacatcacttccgatgctccacagcaaacctatgatgtagtggggcctatctgcgaatcatccgatgtctttggcaaggctgtcgatttgaacggtgtgaagcgtggcgaccttatagcccttcgctctgccggagcttatggtgaaatcatggcttcaggttataactgccgtgagttgccgcaaggttatacatcggacgaactggtataagtgcagtacaagatttgaatgatttatcaagcacgggaacatcctttttgtttctgtgcttgttttttatagctacctgatttttttgttgtatttttacagcattaatatctgatataaatccattatgaaacacaagtcgattttcttttcacttagcctgatatttagttcgttttgtctttcagcgcaggaattgccgaaagaagtggtctggcaagagatagagggagttaatgtaccgattccgcctcagacgcatccccgtttgtatgttcgctcatccgatttacccgcgttgaaggaacgcctgaaaactcctcaggcacagcagacactttctcttatgaaagagctgagcaaagaccgcactccggccgaagaagctgccgttacaaaccgcggtttccgctattattacgagatgcgcggcgttacatcgcgggtgcagttgcaagcccttgactatctgttggaaggtgacaaacgtttggcacgccgtgccattacagccatgctcgatacgttgcagcgtgcctctttcggcactcgttccgacttgtcgcgggccagcggagccatgctgataacgggggctatggtatatgactggtgctacgacctgatgaagagttccgagaagcaggcttatatcaaagaatttatccgtctggcaaagagtatggaatgcggttatccgccacgcaataaccaacccatagcggggcatccgtcggagtggatgattatgcgcgatatgctgtcggcaggcattgccatttatgatgaatatcccgatatgtacaatcatgtcattaccatgctctatcgtgattatatcccggcacgcaactatttttacgaagggcagaactatcaccagggcacgaattatgtacatgtccgctttgcctgtgacctctttcctttatggattctggataagatgggagccggtagcatttacagctcttcggcgaggttcgtactctacgacattatctaccgccggcgtcccgacggagtgttgatgcctgcgggcgatgattatccgcagaaccgtcccgcattgcttactatgccgacgcctatgtttttggcttccagttattataaagatgaatatctggcttatgagttcgagcgtaatccccggttggacaagtcgggcaacgagtccatgaaccattgtctgatatacgatctgttgtggcgtgactacaccctgaaaggcaaggcccccgacgaccttcctttgacacgttattccggtactccctatggctggatgattgcccgtaccggttgggatgccaactgcgtgattgccgagatgaaaattaatgagcaatttgtgggtaaccaccagcacatggacggcggcagtttccaaatttaccacaaagggcctttggctatcgatgccggtgcttatagcggtagttcgggcggttataacagtcccaacaacaaaaattacttcaaacgcaccattgcccataattcattgctgatgtacgatcctgacgaaaagttcggctgttggaactatggcgggggtggaaagacacggtttgcaaccaatgacggcgggcagcgtatgtgcggcgaaggttggaaaacctgcaattcgctcgacagccttttgtccgaggaatatacggtaggtaaagtgttggctcatggatttggtcctgacgcgcaggctcccgattattcttatttgaagggggatataacacaagcctatacccggaaagtgaaagaggcgaaacgttcttttgtattccttaacctgaagtccgaaaccgtgcctgccgcacttattgtatatgataaagtatcggcttccaatcccgatttccgtaaatactggttgctgcatagcattgaagaacccacgcttgaaggtaatactttcaccgtgcggcgcaccaaagacggtgatagcggtatgctgcacaacaccgtccttttacctcaggcagataatcttcgtatcgataaggttggcggtcccggcaaagaaaactgggtgttcggcactaactatcccaacgatgccgtagccccttatcttgacaatgccaacgagcgcggagcctggcgggtagaagtttcacccgttgcccctgccgttaccgataacttcctgaatgtgatacaggttgccgataaccgatgcaacaagttgaacgcagtgcagcgtattgaggatgaccggatagtaggcgttcagttagccgatcgtgtcgttacttttgccaggagcagcgaaccgctgcagaaggatttcacccttacagttaacggtacgggtacatataaattcgtcattaccgaccttaaagcaggtaattggcaagtaaagaaagacggttgtgtctttattccgttgaccgaggtgcaggcttccgatggagtacttacttttgaggggagtgccggtagttatgaattttgtaggtaataattttaaataaacaatagagcaggtatttaacttgttctattgtttctgttatttgcactgttgataaaataatgtagttatgaagcaatacgaagctgtcatagaaaccttagataagttgggtggagtcgcaactttaggagagctgaacagagaagtttttaaaataagcgactgtgaatggaaaacaaaaactccatttgccagtatccgccgcattgtgcaacagactaaggggatctataagataaagcccggattatatggacttgagaagtatagaaaacaaatagaagatagggggattattgtagaaaccgagaagaacaaagattcaaatgatgttataatgttcaaccatacttactatcaaggtattctattaataatagggaagtaccgtaacatgcagactttcgtacccaaacaagataaaaacaagaaattctacgatgggcacaagttacacgaactttctactcttgcagaacagccgccttattcctatcctcaactgataaagcgcagtgctactattgatacgatatggtttaacggacgcaatatgcctcattcattttttgagatagagcattctacggacatccagaactctttgctgaaattcaacgacctgcaagatttctatgtaagaatggctattgttgccgatataaaacgcaaaccggaatttgaagctaagatgcgttttcatgctttcgatgatttacgattgaacaaacgtgtgtcatttttaagttatgatgcccttgttaagcaatacgaaatggagcaggaaaaacaatcatttgaatttatcctttagatttgcaaatacttgcttttctttatttcgtaataaaattaaagatattgctcttttggatagtatggggaagttgtctgtacaagaggactttgcttgcggttatgatttacccttttaatgaacatccaagagttctttgttacggttgttttgggtttgaaaatataggtctgtataaaatagtgctccccgcacttcacagtgcagggaaggcacagcaaacaaacaaaacatttctgatttgaataaagagatattcttatcagacgtttttgttttagatatttagagcgttttaatgctttggaagtggaagttggatataagttgtgtatgtaaattctatattctcatttgtacaaagcaatgatttcttattattttaagctatttatttcgtacacaccggataacaaaagctattatttcacctgttgaagagtcttcacccccaatgaattcattttgaagatgtctgttgtacgtagtgcatagatagtatcctatggcatcaaaataaggttcgtgcggatgtccgtcggtaaatctcataaagctactatatgggagttttaatacatctccgtatattgtgtatccatctttgggtactccttttgcataggaaagcaaattattgaactcttgtaaagtaggagttctccaagtgctattaggttcaacttttcgacatgggtctcttgaatcggaccaagttgtgataagttccggattatttggcaacggattattgaatacaaaatagtccggagcattatttgctttgctgcatgtcagtgtattgggatagataccatatttttttgtttctgctgtataatataagtttccgtttgcccaaatatttcccccgataatatacccttctgttgtggtgaatgaaacgttgttgtaataggtgttattggcgttaagagtcactccggataatgttgtgctcctattgctaaatggtttgttgccaatggtaagattcaattttatcgttacgcttgcagaagtttgtggcaataaatacgtgtaattgctatacacactcatcgcattcggactgctccaagtgatatttatcgttcccgatccggcttgtgctgtcagtgcattgtttgtgaaagaataggtagcattatgtttgggcagagtcactgtacccgtacatgccgtaattattcccattctttcggcttgggcaatggcttgtactctgtatcgtgcacaatgatgtttgaacacgatgttactcaacgtatatttgctgcctgtattgttaattacaactccagcttttacatacgtcataaaattttgcccgtttgttacgggaacacttgtagagctgttggtaaatgtggtaatggcgcttgaattgccgtatgaataaacgatgaatgtataagttcccatagggagaataaggctctttgtggtttgtacgctgcttcccaacagcttataatctccatatccggcatagtttgcagtggaaatttcggtggcggtagccgatttataagctatgacccggaaagttatgttatcttccatgtttgcccagcgggtggcggcttcatcggttgcatatcctgcggggtaatacagtgtactcactttcatattcaagtcgtattctcctttttgtttgacggtttttgttattccgcttcgtgtgccggcaatctcttccgtgctccagccgtttgtctggggagcttccacctcaacgaggatgttgttgggagaggggttctctatgctgtcctcgtattttccgcacccgattatcagcaggacaaccgatatatggaataacatatttcttatcattcgtctcatttttttaaggtaaagtaatcgtttatgaaccgtttgtcatttttgcacctgctaccattgatccggactttgaggcatggttattgttcccgaacctgccgatgtctgtccgctccacgcttctgctgatatacttgttgctatcaccaatgtcttgtcgcccgtaagtgctgctgcttccgtggtatatcccgcattgttcaccgccttgatattcacgatgtagcggcagttcctttttagcggaatataacttcccccgctagtaaggtccactctgtaataatgtgtgcttcccgcataagtacctcctacgacaaggcatacattattgtccctgccatttccttgcggtgtttccgctacgtagatagtccgtatcagtgatttgccgtccgtgcaggtgtaagtcagcgcatcgtttgttccggcatccggggggatggatacggacgcaaccacgttatcggtaattgtcccaccgtttacaggagctgcgtagcctttattcttggtgcagtacacgctgactgttttcaacgtaaatccgcttattcctgctgctgtttctccatttagcatacatcccacatctatgcgtgccagcgaacgcagcaacgtgatgtttcccaaagatgtggcaggagtgatggcttgcgttgcagtcgtttctccccacatagggaaacggctgtagtttgtcgttccggttgcattccacattccggtggcatcgaacgttatcattttcagaacatcgtttttggcagtgttatccggaatgacgggtagtttctttccggcattggctatgactacaagtctgtatttctcgcctatcaggctttgtttcagggtcactatgtacttttcatcctgtaactgtacttgtggcgcctcatagctgaacgtttccgtggaactgtttgccttgaataccaatactttcagttgggctatgtctattgtattttcctcgttggatgtaatggcgcgggtggcggtacttccgtccgttgccgtcggtagcgaaatgcggagtgtgagcattacttcgccattgtcggtcagtgtgccaggttgcccattgtcgcaagccagcagggcaaggacggttaccgcacaggttacgatgcgtaataatgcggcggatttgcttctatattccgatagccctgtcatacttttttaatttacatttccgtttcctgttccacttctccccatggcagtacttttacgaatactcttatttcggtctttctgaaatctatttcaatgtcagtttgctttccggcttccgctcgtaagaggtgtagctcgttatcctgcgtaatggtgcatagtttttcctgccctctgtatatttccacttcgatacattcttcttcttgggttggaaatatgcgaaagggcggagcataggcatctccttgctcatctgtaaaggttggcggtttgtatcctgcgttttctccggttacttttcccatgaaatccacttcggaacccgttccccgtacaatgaaggtataggtttctccctgatacggatagcgttctgcaagatagcgtgtccgtatgctcaatcctgcggccattcttttcataaccagcgtgattttttcctcttgtatgctccttgtagcggtgttgttcagctccttgcggcagtaaaagaggtcagtaacaggcaaatggcttccttcggcatgttgtttcagtttcaggcgtgcttcctctagcagggttcccggtttgattttggcggtaatcagggtatcttccttgatgtttccccacgctacgagggtaagccgtgcttctttgtggtttccgaaaagatagtctgatgacactcctgcaggaaccatgcgtacaaaaccgttttctccgaaaagatacacttccgatttctccagtacaccgctttgggtgagatcattacctgccgcatccactacccgcacgtgtatttcgtactgcatgcagtctccggtgtcttcccgcacgcatgatacgtgcagaaaggcaaggcaggcatacgatgccgtaagtatggctgtgcggataggtttcattactgtttatggtttcgggtaattattcgaatgtcacgtcctgcgtgatgttcagtgcccagtcggctacactcactgtcagttcgagtgaagtagggtttatctctccggtggggtcatcggttcctatattcttgatagttgccttgatggcataggtcgtgttgcgggcaatgtttgaagtacccgtgcccgaagctccggtgatatttgttccggtctggctcttgttgacgattatcggataatagatggtggttcctgcatcacttgcacttttcttgaacgttccttccagtaccaatgccgtacgggtggcctcttcgttggggagtatatagaaccagtagtcggttttatgctcgatacctacgcttaccgggggagtgaccgaatttgccagataagctacagttccgctggagccggtgtagtttccggtcagataatccggtgtgctcattttggtggtgctgtatcctcccgtgcccggtacagcttctttcacggcattccgcacaaagatgtttttcagttcgtaggatgccgccgagtactgtccgttggggtcaaattcggttctgatgccgcttacggacactcttgcaacgagcctgctcagccgggctgtcataccggtgttgatgcctgcgcccagtgtgaaggtggcgttgccatcaccgttttttacgtctccgctcatgggcagacaatccttggtctgggcatcacccagttcaattgttctcttcaggaagtcggtcttgttcaggacgcctgaaaaataaccgtctgtaggggcgttggctaccacgatgcccgtacagttcgttgccggagtacagttgatggttattgccggagtggtgttattggttacggtccgtatggcattcaccgattcgtcactgttgaagatggcgacggtgaaacgcttcaccgtattctcttcgttttgtgtaggcaatgcgcttccggttgccttggtgctcactccgcttcccgtcaggcgcagttcgagttgtgccgtctttccctgcggcatgggttccgttattccgttttcttcactgccgcatccggctagtgtaaaggttgctgctgccagcatgctccataaatagctgtttgttttcatgtatgcctgttttataggttaatatacttttggtgttcccggtcattttgctttcctatttgtttttcaactctttcagcaccctgtctgcctgctctatgccggctgccgctgccatggtaagatatacttccgccttgtcccgttttccttcctgtaggcagagtatgcccatgttgttgtatgcgattggcatggttgcgaatctctccagatagcgccgtgctttggccgtttcccctttggtgagtgccacggccgctgcattgatattggcttcggggctgtcgggaaacaggcgggctgtgaggtcgagtacatcgttgtattccgtagatcctttcgggtaactgcccgctactgcaaagagctcgttcaggcgcagtgtctgacgttctcccgtacgggacatcttcaggctctccgccgcatccggctgctggcgggtgtactctatcctgtagtcgacccgcataacttcgggaaatatcttttccgccaggtatctgtagggctttccgtcggcaagtttcatcagcattcgttcccgccctttatccatgtctacactccctatcaggtctagggcggcctccctgaacatcatgccgctttgtcttatcagtgcggcaatggagtcccagtcttccggaatccaggttacttccagcggaatgccagttgcaagtcggttttcccgcaggtatgctttaaggttcagtgagcgtgccagtgcattcatttcgttctttttcaggtttccggcaggtgccccgtatcctgtaaccttcactttcaggagctccgttccctcttcctgtcggatgttctgcaatgcattgcgcagccggtggtatatttctaagttctgtttgctttcggacaattctcccagcgttttctctcctttttcctgcttccctttgccaaagtatgggatggaccccgtcactgcatgcagtgtgtctttgccgggtgcaggctcgatgaagttcacccaggccaggtatttcctgtccgtatccatgtcccaggctgaagtgcggttttcgggcaggttcagcctgccggcaatcctgtcttcgtaggccttgccctgtttgccgtggcaggcgcattcctgtgttctcatcaggagccgggcgtccttcatccatcccttatagggcactgccacccggtatcggaaggagcgcgccatcctggcgtcgttccttatcactactgcgggtatgggggccggatgcccgtttccggcaaattccttttgccgctggtacactttctgcttttccttgccgttgatgagtaccgccggcagggcttgctcgttttccccgctgatgagtacgggcgtcagggtcagcgattcgtccgagggcattctcagtccttcgaaatcgactgagaggtcaatgttcagacgcccgtccgcaagcgagaactgctgtccggtgacgaacatttccccccggtagaattcctgtgcatgacctgcctggcagcagagcgccgatagtgccattatcataggaatacggattaagtttttcatactttcaatttgctgttgtaatttatcttgttattattgtatcatatacactaaagatatggaggctttggtgggagcgatgaaattcctgtttccgcttcctgtcttttctccgcagtgcgcgcagcggtagcgttcgtatcgggtgtgcaggaatcctacgccgatgcttgtctccagcccccaacggggggagaggatgaagtgatagccgtatgatattcccactcccgtaaagtctccctcgtatctttcggaacgtacccctttgaacagcccgaaaggcagccttgccttggctacgttgtacacgccgtacatcaggtttgccccgaagaaatgtcctccgtagggctggcacatccagtagcgcagctccggctgcacgaaccagtgtttccagcgcctgtctcctcctgccggaaaggggttgtaatgaaccccggcctccagcgtaaaacgttccgacagctttagttccacaccgaggttgggcgaggcgagcatgccccccgtaagcaggtcgcttttcacggcaacggtttgcgcccctgccttgcctgcacacgacagcagggcaaggagcatcagcatcggtatgtattttctgcttctcaatttctttgttcctgttataaatctgtcagtgtaatctccttcaggtatatcctggttatctggtttactattccgagtttttgtgcggctcttccgtattgtgcatagaaccgctcggtaatggggctgttgcagttcagatgttctcccgtagcttcgagaatatccagcagggatatttccatggcttttttagcaggaatataggactgtatttccagcggatgttccttttctttcaggatgataagtccggcattggtgagctgtgtcagcaatacccgcatctgcccttctgtaagtgtgcactgctttatgcaagtaccgtagtctcttgcatagatacatttgagtactgcaatggcagtctgtgttttgggcgttatcatgtagttttcttgtttgtttgattgttggtatccggccgttactttgtaggtaacgggagattgccttcagacaccctgcagaagcgtctgccgcatatgcatccgggttgtataaccgataaagttatataacagacgttttcccgctttcctaccggaaggcggcaaggggggctttgctttattggttgaagtcggtttgttctgttttgtctgctgccggtcttttatgccgtatatgataagattttatcttttttattttgtttttcaagttttatagttacttttgcggtaggaatatcctccgttacctacaaagtaatccctttgtaataatctgtatcatagttatatacatggaatgcttccttgtcatccttgttggatactgcatttcttcacgtaagcgataattttcttattggtcctgtccagcgcttcgttttcgaagggtttcagataggtttccgtaacctttaccgatgaatgccccagtgcgttgcttattactcccacggcgactctggtgtggaacgccgttgttgcccatgtgtgccttgcggtgtaggacgacagctttccgcccagtctgagggctgctgccagcagtttgagtttccggttgaatctccgcaggacctgttggtaatgtcggtattcttcacgccttcccagggggaaacggcagttttcgtcccccagtatgttgagcaggtagggtgagtccgtgcggcggtcggcgcatcggcggataagctcagcggcttcttcggttacgtgtacacgtatctgccttcccgttttctgtctttggtaggtaattaccccgtccttgaaatcgcatttgcgcagccttgcgaggtctgcaaacggcattccccgcaagaggaagagcagtgcgaaccatatctgcgcttctttgagttcccggtgcaaggaagcggagatgtcgagtgcttgtcccatttcggcaggtgggagtgcgcgtttcacgtcggcacgggttccggtatatacatgtttgaacagtccgggcacgtagccggtgaggcctgccagcagcgcgcggttgtatacagcccgcaacatgcgcaggtaggtggacatggtgttcagcttgagcatcctctccagcaggtgcctttcgaatttgtgtatcgtggcgatatcaaacactttccgcatgcgtatttcgttttttggatgttcgctttcccagtaccgttggaaagcccgtagcatgctgcggtatacatgggcggttccgaaccgcccctcgtcttccagttcctgtatgactgaaagcgtaaaggttgttaaatctttcataatctgttggctttataatatttacagtctttgcgtgcgctattaccgcacgcaataaatatactgcatttttctgaaatttgtttacttgcagatagcggcctgttcccgaagagtattcgacacgtattatacatcgcttttttgtatacctttgtgtccgttttttaatataacttataaaaatgaaacccttaatttaaatcttatgataacaaaatcaaactggtggaacaagctccttaaaatcgtaatcgtagtggcatctgccgttctctgtgctttaggcgtacaaacaatgtctgcttaattatgtttcatattttataccttatacttaagttacgtgagatttaccaacctcatcattatccactgttccgctacccgctgtgaccgtagctataccgaacatgatttgataacagaccacctgagccagggcttcttcggtgcaggttatcactattatatctgcaagaacggtgatataaagatgctccgtcctttggaacattccgaggagcgtgctcgcggctataacgctcacagcataggtatttgctgcgagagtgggctggatgaacggggataccctgccgatactcgtaccgattttcagaaacactctttgcgtatgcttgttatgctgttactgcgtgattatcccggcagccgtctctgcgggtatcgcgaccttagtcccgacttcaatcgtaacggcgagatagaacccgaagaatggataaaagtgtgtccttgttttgatgctgtatccattctgcaagatccgctgccccctaatccggtttcattgtaatgcgattgttatatgtgaaaggttatgttatgctttttttactaaataatgttattgggataaacaatattcatgtgttcttgttatatttgtaatcatttcaatttacttaataaatacaattatgataacagaaaaattacagaatgcaattaacgagcagattacggctgagatgtggtcatccaacctttatttggcaatgtctttctatatggagaaagaggggtattgtggtatggcttcctggttgaagaagcagtcgtttgaagaacatgcacatgcttgtgagctggcatcgtatattatcaagcgtggtggcaaagccaaactggataaggttgacgttgttcccaacgacttcggtactccgttggaagtattcgaacaggtttacgaacacgaatgccgcgtatcaaagatgatcgacgctcttgtagacgtggctgccgctgaaaaagataaggcttcccaagacttcttgtggggattcgttcgcgagcaggtagaggaagaagctactgctgccggtatcgtagatatggtgaagaaagccggtgcagccggaatcttctttattgatgcgaagctgggcgaaagaaaataagtaagaaatataaccggtaaggtaacgggtggtaaggcgtgggctttatcacccgttttttatctgtcagctatcgttttagaaaccggaaattgtattgtttcgtgtttcttctggtaggtaataaaataattatctatatttgtaatgagaagaaaaagaaaatcaagaagtgatagcagagcattggaataaattctttaacaaagccagatgagcagttatgaaagacgtaatagaaaaagtatggttgaccgatacagctgtatggatacgtataattgacggtagggaagcttgtgaagaatttgcaaattattaaagattaaaatttgctacttctgaacagcgtgcgaactttgaagtgagtgaatatggtattcattggagagaattggatgaggatttaagctttgagggcttttttcgggaaaagaaatcaaatcttttatatgacttattcatagctcatcctgaactgaatgcctctgcagtagctcgtcggttaggcttgtcacaaagtctgtttgcgcaatatgtgagtggaacaaagaagccgtctaaacaacgttttgatgaaataatagaaacaatacgtgaaatagggcgcgagctaatgaccgtgcctgcatgaaaaatagggtaatgttgcaagaataggaatgtgttgcaacacggaaacatttattattttcaggcacggattacgcggatttcacggatttactttatcctttcttccgtgtaattccgcgtaatccgtgcctaaaaaaacatcaagttatttcagcactcccaattcctttcctaccttaataaacgcttcaatacatttatccagatgttccttattgtgtccggcagagatttgtacacggatacgtgcctgccctttcggtacaacggggtagtagaaaccggttacataaataccttcttcctgcatgcgggctgcataaacctgcgatagtttggcgtcgtacagcattactgcgcaaatggcactctgggtaggcttgatgtcgaaaccggcagcagtcatcttgtcgcggaagtaatttacgttttctaccaacttgtcgtgcagggcgtcgctttctttcagcatcttgaatacttcaaggcttgcaccgatgatgcccggagccagggagttggagaagagataaggacggctgcgttggcgcaacaggtcgataatctctttgcgacccgtggtgaaaccgcccaaagcgccgccgaaggctttgcccaatgtaccggtgtagatgtccacacgtccgtaggtgttgtacagttcgctcacgccatgtcccgtagcgcccactactccggcagagtgggattcgtccaccattaccagtgcatcatacttttcggcaaggtcacatatcttgtccatgggagctacattgccgtccatggagaacacaccgtccgttacgatgatgcggaaacgttgtgcctgggcctcttgcaggcatttttcaagttctgccatgtcggcattggcataacggtaacgtttggctttgcagaggcgcacgccgtcaatgatggaagcatggttcaaggaatcggagataatggcgtcctcttcggtgaagagaggttcgaacacaccgccgttggcatcgaagcaggcggcgtaaagaatggtgtcttctgtcttgaagtaatcggaaatggcagcttccaattccttgtggatgtcctgtgtgccacagatgaaacggacggacgacatgccgtagccgcgacgttccatcatgttctgagcagcggctatcaggcggggatgattggataatcccagatagttgttggcgcagaagttcagtacttccttgcctttcacggtgatagcagcttgttgtgcactctcaatcaggcgttcctctttatagagtccggcttcttttatttcagcaagcgttttgctgagatggtctttcattttaccgtacatagctttttattttaataggtaatacttcgttatttgaagctctacaaaggacatcatttttcttggaataaacaatatctttttgatagaaaaatgaaaaaaaagtgtgtatatttgcgactcagtaacgaaagaataccttataaataagttgtatgaaaaatattttggtaattggagccacaggacagattggctcggagctaacattggagttgcgcaagcgctatggtaatgaccatgttgtagccggatatattccgagcgccatgccgcagggtgaattgaaatcctcgggtccttcggccatagccgatgtgacagaccgccagtctattgaagtggtggtgaggcaattcaaggttgatacaatttataacctggcagccctgttgtcggtagttgccgagagccgtcccgccatggcgtggaagattggcatcgacgggctgtggaatgtgctggaagtggcgcgcgaatacggttgcgccgtgtttacgccgagctccatcggttcgttcggagagaatactcctcacgtaaagacaccgcaggataccattcagcgtccgcgtaccatgtacggcgtaacaaaagtgactacggaattgttaagtgattattatcatacgaaatacggggtggatacccgtgcggtacgttttcccggaatcatttccaatgtgacacctccgggcggcggtacgacggactatgcggtagacatcttttattctgccgtaaaaggtgagaagttcgtatgccccgtaaaggcgggtacatttatggatatgatgtatatgcccgatgccattaatgcggctatctcgctgatggaagccgatccggaacggctgaagcaccggaatgcgttcaacatcgcttccatgagtttcgacccggaaatgatttatgcggctatcaggaaacatgtgcccgacttcgaaatgacctatcagatagatcctttgaagcagtccattgccgacagttggcccgattcgctggatgactcctgcgcccgcgaggaatgggactggatgccgcagtttgacctggagtctatgactgtggacatgcttgaaaaactaagagcaaaattaaataaatgaccgtagaggtcggtaaaggatgaaacgattactaacgggattttttatactcgtctttctgttctcgtgtgggaacagaaagacgaaaatggatccctttgctaccattaccgaaatggtggattcggccgggcatgaagccgatacgctgcaacagacagaagtgaaggaggagcctgagccgttggaagcggacgaactgtttgacgattttatcttcaactatgcttcggacgaggctttgcaacgggcaaggacggagtttcctttgccttattacaaccgggacactccttcgaagatagaggaacgcttctggaagcacgactacctgtttaccaaacagaattattatacattgcttttcgaccgtgagagcgacatggacatggtgggcgacactgcattgaaatccgtacaggtggagtggatttatctgaaaacacgtatggtaaagaaatattattttgaacgtaagcgaggcatgtggatgctcgaagccataaatttgcgtcatatcgaagaaggtgaaggcgagaattttgtggatttctatacccgttttgtaacggacagcctgtatcagagcgagcatattgccaatccgttgcagtttgtcaccatcgaccccgacgatgagtttgccatactggaaaccactctcgacgtgaaccagtggtatgctttccgtccgtcgctgcccgcagacaagttgtccaacatcaattacgggcagaagaacgaggataattcgaatacgaaaatcctgaaagtaaacggtatcggcaacggatattccaacgttttctatttccgcaggcggggcggtgagtggaagatgtataaatatgaagatacgagcatttgagacttatgagaatacccaatacattcggatttgatgtaaaagctgccgtatatgcagaatatcactcggtagaggaattggagaaatggatagccgaagggcgcatcacttctccttttttgcatataggatgcggtagcaatctgttgtttgtgaaagattatgaaggcatggtgctgcactcgcgcatcggcggcatggaagtgaccgcggaagatgacggacaggtgcatgtacgtgtgggtgcgggtgtagtatgggatgattttgcggcttactgtgtggagcagggctggtacggtgcggagaacctgtcgctgatacccggtgaggtaggagcgggcgccgtgcagaatatcggtgcttacggtgtagaggtgaaagacctcatagagtctgtggagacgataaacatccacggtaggaagcgtgtctatcggaaagacgaatgtgaatatgcctatcggaaaagccttttcaaaaatcctgaaatgaaatcggtctttgtgacttacgtgaatttcgtactgagcaagaaggagcattatacattggattatggtacaatccgtcaggaacttgccgggtatccgtcagtgaccttagccactttgcgccgtgtgattatagatattcgcgaaagcaaactgcccgacccgaaagtgctgggtaatgccgggagtttctttatgaatcccatcgtgcctcgtgcgcaatttgaagcgttgctggacttgtatcccaccatgcctcattacgaggtggatgctggacgggtgaagatacccgccggatggatgatagaccaatgcggctggaaaggcaaggccttaggtcctgccgccgtgcacgacaagcaggctttggtgcttgtgaatctgggtggtgcaaccggaaaagatgtggttgccctgtcggatgccgtcagagcctcggtaaaggagaaattcggagtggaaatttgtccggaagtgaactttatagaatgattaaccgataatcagcaatcactgttttatgaaactgactatattaggaagcggaacatctaccggagtgccggaaattggctgcacatgcccggtctgcacatctgccgacccgcgggacagccgtttgcgtgcatctgccctgctgcatacggacgatgcggtgatattgatagactgcggtcccgatttcaggacacagatgctgcgtgcttccgtgtacgagcggatagacggcgtgctgataacccatgagcattacgaccatgtgggcggattggacgatttgcgccctttctgccgtttctcggaaatacctgtctattcggatgcctacacagccgctcatctgcgggcacggatgccttattgctttgtggataagaaatatccgggtgtgccgcgcatttatttgcaggaagtggaagcgggcaggcctttctacgtgcgagaaacggaaatactgccggttaccgtgatgcacgggcggctgcctatcctgggataccgtatcggcaggcggctggggtatgtaatggacatgcttacgatgccggatgcttcgtatgaacaattacagggactggatgttctggtaataaacgccttgcggccgcagccgcactctacgcaccaaagcataccggaagcgctggcggcagcggaacgtatcggagcaagggaaacttatttcatccacatgagtcatcatgcagggctgcatgccgaaatcgaccgccaactgccgccccatgtgcactttgcgtatgacggtatggaaatagatttctaaactttttgaaacatttgttttgttttattagtataaatgtttatttttgccaacagttgacgaatgtatgccatgaagattcgaatccttatacgaatagccgttattgtgtccatagtattgctgtgtacaggttttggcgtatactcgtttctgcgaatgaatgcagtggaaaaccggcaggattttaatctctttacgttagtgccgcaagatgccacggctgtacttgagacagaccgtatggcggatttgatggaagatatcgacggcttgcattgcagcaaggatgagcatttcctgtatgtatcggaactttttgtatgcctgaagaagtatttcaatacattggtaggtgatacgccgcatggactgagcaggcagatgaataaaatgcttatcagtttccacgaaccggatactcctttgaatcaggtgttgtattgcagcctgggggcgggggattacgagctggtggagtctttcgtgcgtaaatactgttccagtacttttccttccaagtattttgattacaacggtgaggaaatacgcatctatcccacggcggacgggcgtttccttgcggcttatttcacccctgactttctggctgtcagctttcagaagcgtctgatagagcaggttatcgatgcctgccgttccggacaatcattgatggacatggcatctttccgtaccatgtatgccggtaagcgtaacaatgtggcggcaacagtgtatgtacgcatgaaagaagtgggcatgggcaagaatacagacggcattcgtccgcagacgcatctgggaagttgggcagagtttgacatgaagttcaatgaagaagccgtttattgttccggtatcagtcacggagcggatacagcccggacgtttatcaatgcgcttcgcagacaggaaccgataaaggatttttcgggagaacggcttccggcatctgtcttcttctacaaccagtgggcaatctcggatttggaagccatattcggctttacttcgcaacaggaatatgctaaggctgcctattccgattatatcaagaagcgggatggcgagtggatggaatttatgaaaacgtatgcgggagagaatgtcatgtcttgcctgtttcattccaaggatactaccgaccggcatccctgcgctgtaatgagcgttgctgtaaaagatgaagcgcaggcagaacgtgctctgcaaaaattgctgtatgccactcccgaagaaaaaggcgctccggccgtggagcggacctatccgaactacaggcgatacccgcgtgcacggaagtaccggcagtatatgttgcctcggaataccgtattgacacaactgacaggcattacggaatccgcgcttcacacctacgcctgcttctataaaggagctttgttgctggcgcccgatgcacagagtctctccgcttatgtggacgctttggagaacggggatgtgctggatggtacttcggtgtacgaggaaggtgtaggtagtctttctccttattataactttgccatgatggtggatatggaagagatgatgcgccagccggaaacttatgtgtggttggttccgaattttttcttccgtcattccgatttcttccgccacttcactatagccatacagtttacttgcacggaaggagtggtgtatccgaatctcgtcttgctgtataaaggagagaaaataggggagtttgaagaagtagggaattgaaaaataagagaaatagaaaaaagggcttgtcaaaactaaatccgcttactatttattttttattaggcacggattacgtgaaaaacacggatttcacagattttctttattctttttctgtgaaatccgtgtttttcacgtaatccgtgcctaaaagaaatcgtcaagtgtattttgacaccttccttttcttaccggataaaacttactgattcctgtttttcaatttttaattctcaaattagaaaggcaagtcgtcctttgcgtctccggataagaattccggcgctgcggacggagcgggcggcggaaccggtgctcccggtgcaggcgctgccgttgctgcgctgacacgttccactttccatgcgcggatactgttgaaccagcggtcttgccactgacgtgcatcgatgtcgaaagataccgtcagctcttcacccatctggatattgaattgttctattttatctgctccgaatacgtcgaaacacattttgcggggatattgcccgtggtcttcgattacgtattcctgcgctttccactcgttacctgatgctttggaaactccgcctctgggctggagtatagcgatgatttttcctgtaaattccattgtactctttttaaatgatgcggcgaagttacaattttttagggatatgcgacgaataaacggctgttttttctttgccgtagggaattctttttttaactttgtccgttagttaacaactgaactgaaattaaaacttaaatacatagaatatatgaaatttatcgtttcgagtactgcgctctccagccatttgcaggctatcagccgcgtgattaattcaaagaatgcgctgcctattttggattgtttcctttttgaactacaagacggaaccttgtcggtaactgtttccgacagtgaaacaacgatggttaccacagtagaagtgaatgacagtgatgccgacggacgttttgcagtgactgccaagactttgttggacgctttaaaggaaattcccgaacagccgctgacgtttgacatcaatacgagttctctggagattacggttcagtatcagaacggtaaatacagcctgatggggcagaatgcggacgaatttccgcaatcggccatgctgggcgagaatgccgttcgtgtggaaatggatgcacaggtgttactgggaggtatcaaccgcgccgtgtttgcaaccgctgatgacgagcttcgtccggtgatgaacggtatctatttcgatattactaccgaagacattacaatggtggcttccgacggacataagttagtgcgttgcaagacgctggccgccaaaggcaatgagcgtgcggctttcatcctgcccaagaaacctgccaacctgatgaagaacctgttaccgaaggagcagggcacggtgaccattgaatttgacgaacgcaatgccgtggttacattggaaagctatcgcatggtatgccgcctgattgagggacgctacccgaactataactccgtaattccgcagaacaatccgtataaagtgacggtagaccgcctgcaactgattggtgcgttgcgtcgcgtgtctatcttctcctcacaggcaagcagccttatcaaactgcgtatgcaggagaaccaaattgtgatttcggcacaggacatcgatttctccacttcggcagaggaaacgcagacatgccagtatgcaggtaatccgatgagcatcggtttcaagtctactttcctgattgatatcctgaataatatatcggcggatgaagtggttatcgagctggcggatccttcgcgtgccggtgttattgttccggcagagcaggaagaaaacgaagacctgctgatgctgttgatgccgatgatgctgaatgattaatgaaatagtaatctgtcatttttttatttaggcacgggttacgcggatttcacggttcgggtttatagagaaaccgcaccgttccgtgcagtccgtgcctaaaagataaataaatacgaaacttcatgaaactgaatcttaaaaatccgattgtcttttttgacttggagaccaccggtacaaacattaactcggaccgaatagtagaaatctgttatctcaaagtatatcccaacggaaacgaggaaaccaaaaccatgcgcatcaatcccgaaatgcacataccggaagaggcttccgccgttcacggcatttacgacgaagatgtggcagaatgccccacgttcaaggaagtggcacgcaatatagccaatgatattgaagggtgcgaccttgccgggttcaattccaaccgctttgatattccggtactggcggaagaatttctgcgtgcagacgtggatatagatatgagtcgccgcaagtttgtggatgtacaggttatcttccacaaaatggagcagcgcacactgtctgccgcttataagttctattgcggcaagaacctggaagacgcccatacggcggaagccgatacgcgtgccacttacgaggtgctgatgtcgcaactggaccgttatcccgaattgcagaacgatgtggctttcctctcggattattccagcttcaacaagaatgttgactttgcaggacgcatggtttacgatgataaaggtgtggaagtgtttaatttcggtaaatacaaaggcatgccggtggcagatgtgctgaaacgcgatccgggctattacagctggatactgaacagtgattttacactgaacaccaaggctatgctgactaaaatccgcctgcgcgagattacccagaagtaaatttgtaattagtagtttgatttcatggcaaacccactgaaaggaaagaaaatagtactcggcattacaggcagtattgccgcttataaagcctgttatatcattcgcggacttataaaacggggtgcggaagtgcaggttgtcataacgcctgcgggcaaagaatttataactcccattactttgtctgcccttaccagcaagcccgttatcagcgagttcttcgcgcagcgtgacggaacctggaacagccatgtggatttgggtctgtgggcggatgccatgctgatagctcctgccacggcttccactatcggcaagatggcgaatggcattgccgataatatgctgataaccacttacctgtcggcaaaagctcctgtgtttgttgccccggcaatggacctggatatgtatgcccatccgtccacccaaaagaatctggagacactgcgttcgtatggtaaccatatcatagaaccgggtacgggcgagcttgcaagccatctggtaggcaagggcagaatggaagaaccggatgtcattatccgcaggctggaagagttctttgccgctaaggacggtgatctggcggggaaaacaataatgattactaccggaccgacatacgaaaagattgatccggtgcgttttatcggcaattattcgtcgggaaagatgggctttgcgcttgccgatgagtgtgcggcaagaggagcaagggttattctggtttcgggacccgtccagctccggacacactaccctgtataccggtatttcggtgtggagtctgccggagagatgtttgaggcggccacctctttgtttgacgatgcggatgccgttatcatggctgccgccgttgccgactatacgccggagcaggttgccgacaggaagataaagcgcgaaaagacaggtgatatgtcattgcacctgaagcctacacgggacatcgccgcccatttgggagagatgaagaagcagcatcccggcaaggtgctggtgggctttgccctcgaaaccaatgacgaacagcataatgcggaagataaactgaaccgtaagaacctggattttatcgtgcttaattcgttgaatgacaaaggtgcgggcttccgttacgataccaataaaatcagcattatcgaccggaacggtaaaaaggactacccgttgaagtccaaagcggaagtggctgcggacatcgtcgaccatttggcggaagtgatgaagcgtgaatgatattttttgattgtcaactttcaattatctgtttaataaaatgttgcgttctctatacatacagaattatgcgcttatcgagaagcttgatatagacttcggtagcggcttctcggtgattaccggtgagaccggtgcgggaaagtccatcatattgggagctatcggtctgttgctggggcagcgtgccgatgtgaaatccatcaggcggggcgctgcaaaatgtgtgattgaagcccgttttgagattgccggttatggtatgcagcctttctttgaggaaaacgaactggaatacgaagatgagtgtatccttcgccgcgaagtctatgcttcgggcaagagccgtgcgtttatcaacgatacgcctgcctcgctggtacagatgaaggagcttggcgaacagctgattgacgtgcactcgcaacatcagaacctgctcctgaacaaggaaggtttccagttgagcgtgctggatttgctggcgcatgacgaagacgagctaagtaaataccgctctctccaccgggaatggaagcaggtgcagcaggatttggaacagcttgtcgcattgtccgaaaagaacaaggcggacgaagattacatccgtttccagttggagcagttggaggatgcgcatctggctaccggagaacaggaagaactggagcaggaagccgatacgctgagccatgccgaagagataaaagccggactgttccgtgccggtcaggcgatgaactccgatgagggcggtctgctatccgtattgaaagagtgcctgaatacaatggcgggcttgcagaaagtatatcctgccgccggtgaacttgccgaacggctggaaagcagctacatcgaactgaaagatatttctcaggagatttcgggaaaagaagaggagatagaatttaaccctgcccggctggaagaggtgaacggacgtttgaacctgatttatactctccagcagaagcatcgcgtctctacggtggacgagcttctggctctggcggatgattatgcggccaaactgtccaacatcacttcatcggatgaacagattgaaacgttgaaagcccgtagcgaagccttatataataaggtgaagcggcaggcagcggtacttacggggttgcgtaccgccgcagcccgcgaggttgaaaagcagatggcagcccgcctgataccgctgggcatgcccaatgtccgttttcaggtggaaataggtatacgcaaggagccgggggcacatggggcggatacggtgaacttccttttctctgccaacaagaacggggctttgcagaatatttcttcggtagcttcggggggcgagatagcccgtgtcatgctgtctgtcaaggcaatgatagccggagcggtgaagctgcccactatcgtgttcgatgaaatagacacgggagtttccggtgagatagccgaccgcatggcggatattatgcaggaaatgggcgatagcgaccgccaggttatcagtatcacgcatctgccgcagatagctgcccgcggacgtgcccattataaggtgtataaacaggataatgaaacggaaaccaacagccacatccgccgtttgacggatgaggaacgggtaggggagattgctcatatgctgagtggagccaccctgaccgatgccgcgctgaacaatgccaaggcactgttgggcatcgtctgactaatgtagtactttacggttgtaaagtagaggtttacaatcgtagtgtagcactttagccggctaaagtagaacaaaaaaaacaataagatacaatgatagataaaagtgaaatgattttcggcgttcgtgccgtgatagaagctgttcaggcaggtaaggacattgacaagatattggtgaagaaagatatccagagcgacttgtccaaagaattgtttgccgctctaaagggaactttgattcccgtacaacgtgtgccggtagagcgtatcaaccgcattactcgtaagaaccatcagggggtgatagcatttgtctctgccgtgacttatcagaaaacggaagaccttgtgccgttcctttttgaggaaggcaagaatccgttgtttgtgatgctggacggcataacggatgtgcgtaatttcggagcgatagcccgtacttgcgagtgtgcggcggtggatgccgttattattcccgccaagaacagtgtaacggtgaatgccgatgcggtaaagacttcggcaggtgcgttgcataccttgcccgtatgccgcgaacagaatctgaaagataccctgcagtttcttaaaagcagcggtttccatatagtggctgctacggaaaagggtgattacgattacacaaaagccgattacacaggtcctatgtgtatcatcatgggtgccgaggacaagggggtctcttacgataaccttgcactttgcgacgaatgggtaaagattccgatgctgggtacgattgagtctcttaacgtatccgttgcggcgggtatcctgatttatgaagctgtgaaacaaagaacgaactgaatatgaaaaagaagattttcctgctttccgctctatgccttttggaggtacagtggagcatggcacaagctcccaaatgggtggataaagccaaacgtgccgtattttcggtgattacttatggcgagaatgataagattttgaataccggaaacggtttcttcgtgacggaagacggtgtggccttgtccgattgttctttgttcgaaggagcgcaacgggcggtggtcgtgaattcggaaggcgtacagatgccggtagtttctattatgggtgcgaatgacatgtacgatgtcattaaattccgtgtaggtatatccaccaaaaaagtcccggcattgcatccggcaaccgtggctccggctgtgggcgccaatgtgtacatcctgccttattccacacagaaagaccgttcctatactgccggacaagtgaaagctgcggatgaattttccggaaagtatcactactatacgctcaatctgcgcctgaaggacaagatggtgagctgtcccgtgatgaccgaagaaggacaggtctttgcgcttgcacagaagtcatccggcgccgataccgctacaatatgttatgcggtagatgtcgattttgccatggaacagaatgtttcggcattttccttcagcgatatgactttaaagaatatcggcattaagaaagcactgcccgatacggaagaacaggcgctggtgtttctcttcatggcttcctcacaggttactccggagaagtatgcagaactgttggacgatttcatcgctgaatatccgaatagtgcggacggctatgtgcgccgtgccaccaaccggatataccgctccaaggatgatgcctcgatggataaggtcgtggcggatatggataaagccctgagtgtggctcaaaagaaagacgacgtatattacaaccgtgccaaactgatatacaattatatgctgggtaatccggaaaagccctataaggactggtcttacgataaggctgtggatgaaataagaaaagcgattgccgttcaggagcttccggtgtatgtacagaccgaaggggatattttgtttgcaaagcaggattatgcggcagctttggcatgctacgaaaaggttaatcagtccgatatagcgtcggcggcaacgtttttcagtgcagctaagacgaaggaactgatgaaagcgccggcagaagaagtgctggcacttatggacagttgtgtggtacgtttcaccgaaccgtacacggaagaagccgctccttacttgttggaacgtgcccaagcccgcatgaacgccaatcaggcgcgtgccgccatgcttgattacgatgcttattataaagcggtaaacggcaaggtgaatgatgtgttctattattatcgtgagcaggctgccttgaaggccaaacagttccagcgtgcactgaatgatatggagaaggctattgagctgagtccgaaagacctgacctaccgtgcagagcttgccgtggtcaatatccgtgtagggcgtaatgaagaagccttgaaagtgttgcaggatgctttggctattgattctaaatatgccgaagcctatcggcttatgggaattgcacagttgcagatgaaaaagaagcaggaagcgtgccaaagttttgccaaggcaaaggaattgggcgacccaaacgtggacggactgattgaaaagcattgtaaataagcggtatacttaacaaaataaaggctccgctttcacaagcagagcctttgtttgggaaacttccccatgctaaaatataagttaagtctaggtattaacaggttatgaatgaaattttctttcgtatatataaatgcacgattctgggaaatactgcacgagtctcctgattttttttgaatatagtaggaaaagatactatatatttgataatgaacagataaaagagtaaaattatgaaaaaagtgatttgtagtcaaaaagctccgggggcaatcggcccttacagtcaggctattgaagcaaacggaatggtgttcgtatcgggtcagttacctatcgatgctgctaccggagtaatggcggaaggcgcggaagcccaagcccgccagtcgttggagaatgtaaagcacattctggaagaggcaggattgagcatggcgaatatcgtgaagactaccgttttcctggcggatatgtctttgtttgccgacatgaataaggtatatgccacttattttgagggagactttcccgcgcgttcggctgttgccgtaaaggcgcttccgaaagacgccttagtggagattgagtgcatcgcggttcgctaataaatctgccacgataaagctgctgccacctacgaagataaaatcttcggggtggcttttttcttgtgcggcggttacggcggcggggacatccggataacagtttccctgcaagcctgctttggcagcgagcctgcacagctcctcttccggaagggcacgttttacgctggctttggtgaagtagtatacagcatctttgggaagcagggcaagcacaccgctgatgtctttgtcattgaccattcctatgatgatatggagctggcggtaggtttgctgtttcagttgttctacgatgtaggtaatgccgcccacattatgtccggtatcacatatcagggtgggagcctcttgcagcctttgccagcgtcccattagccccgtcagttcgcagacacgggcgaagccgctgcgcacactcctttcgtcaatgtggtatccggcctctttcagcaatggcaaggctgtgaggatggtgcgtgtgttttttagttgataaagtccctgcaactctgttttcagtccgggataatcgttgttcatcctttcttctgcaaatacgacaggggctttctctgccgcggccttttgcaggaaaaccggtttggtttcgggggtggtttcgccaatgactacgggaatgccgggtttgatgatacctgccttttctcccgctatctttgccaatgtgtcgcccaagaactgggtatggtcgaaacttatgttggttatgatgcacaaatccggatgaatgatgttcgtacagtccaaccggcctcccagtccgacctctataacggccacatccactttctcatcggcaaaatagcggaatgccatcgcagtggtcaattcaaagaaagaagggtgcagaggctcgaaaaagtcacgttctttttctacaaagtgcactacatactcttcgggtatgggagagccgtttatacggatacgttcacggaaatccaccaggtggggagaggtgtaaagccccacgcggtatcccgcctcctgcaatatggcagccaatgtatgggaacaggagcctttgccgttggttcctgccacgtggattgtgcggaacgaacggtgggggtgtccgaaatgttcgtctaatatgcgcgtgttttccaaaccttctttgtatgccgagccgcccacttgctgaaacatgggtatgctgttatataagtaagttaaagtgttctgatagtccatcttttataaaaattaacgggaaagcaatcctttctccttattaaagtgttatctttaggaacggcaaagataaggcaattttatttaagtgtgtatgcttgctttattttatattgtcggtatgaggtataaactatttaaatctaaagagtatgggagctaagaaaaactttgtgattgataccaatgttatccttcacgattataactgtttgaagaattttcaagagaacgatatttatcttcccattgtagtgcttgaagaactcgataaattcaagaagggcaacgagcagataaatttcaatgcccgtgagtttgtccgtgagctcgacttgattaccgatgataacctttttaccaaaggtgctccgttgggcgaaggtctgggacgcctgttcgtggtggcgggttcggtagattcgccccgcgtgcacgactctttcccggaacgtattcccgaccatcagatactctctgtcgttgactggctgaccgtgaagaagccgaatatgaaatccattcttgtcaccaaggatgtcaaccttcgtatgaaagcgcgctctatcggtctgctgtgcgaggactatatcaacgacaaggtaattaacgtggatatatttgaaaagtcgaacgaagtgttcgaaggggttgacccgactctgatagaccgcatctattcctctaaggaagggttggacatcagcgaattcgacttcaaggatgttattcaccccaacgaatgttttatcctgaagagcgaccgcagcagcgtgcttgcccgctacaatccttttacccattccgtttgccgtgtcaataagacaaagaattacggcatcgaaccgcgtaatgccgaacagagttttgctttcgaggtattgaatgacccgaacatcaagctggtggcccttaccggcaaggcaggaacgggtaagaccctgttggcactggcagccgctttgggcaagctgacggactataagcaaatcctgctggcgcgtcctatcgttgcattgtccaataaagatataggtttcttgccgggtgatgccaatgagaaggtagctccgtatatgcagccgctgtttgataacctgaatgtaatcaagcatcagttcgcatctaactcaagcgaagtgaaaaggttggaagatatgcagaaaagcgaccagcttgtcattgaagccctagcctttatccgcgggcgcagcctgagcgagacctactgtatcatcgacgaagcgcagaaccttactcctcacgaaataaaaaccattataacacgtgccggtgaagggacgaagatggtattcacgggcgatatccaacagattgaccagccgtatctggacagccagtccaacgggcttgtctatatgatagaccgtatgagagaccagaacctgtttgcccatgttaatctggtgaagggagagcgtagccagctgagcgaactggcaagtaatttaatgtaatatctgctgttttgcctttcctggtgaaggcgaagaatgtgacataaaaagcggatgatgctccactggtaagcaccatccgtttttattagtataccatatttttattatttgcgtgccgagaagtatttcaggaactgggtacgttcgaaagtgtttataccgttcaggtcgcttacattcagcatgcctttgaactggctgatgttttccatccctttgcgttccatccatgcgttcaggaagcggacgtactcttcgataatggcgtaagaattctgatagagtgcgctgcatatctctactgccgaagcgcccgccaagatagcttttactactccttcgggggcatgtatgccgccggatgccgcatagtccagcttgctcacagccgcagaggcgatacctatccaacgtaaggatttggataaatcggcatctgtgctgaagacgcttccggcactttgagccattttttcaatatcgatatccggctggtagaaccggttgaacattactactgccgccgcaccattggcatagagctggtcgatgagtgctatcggattggtgaggttgtctcccaatttcatgataacaggaatattgactgttttcctgatatggctcaagatgtcgatatgacgttgttcaaaagaaccgtaagcatattgtatgtcggtttgcaaagcaaggatattgacttccaaagcatctgctccggcctcttctatctttctggcaaactcaatccagtccgcatcctgatagcagttaatgctggcaatgacaggaatgtcacagactttcttggtttctttaatcagattcaaatattcgcccagtttatgttcgcgtatgtatcctaccaggtaatcgcttccttccggatacatgttgggatctccaagccaatcggcttccatcatgatttgttcctcaaaaagagacttgagtacaatggctcctgctccggcttcgtaaagcttttggttcttggcagcactgtcggtaagtccggaactgctgataataatcgggtttttaagttttaaccctgcaaaggtggtttctaatgttgccataataacagttattaggtattaatatattctttctccaaatattttacttcctacacgtaccagggtactgccggcggcaatggcctcatggtaatcatgggacattcccattgacagctcccgaaaccactctgcattggaaaaccaggtggctttagcctcttggaagaaattgtttaatgaacggaattcagctttgatttgttcggtattgtccgtattcgtagccatgcccataagtccgcatatccggacattgccgagctttttccattcatcgcctgcaagcatctcccggcattcgtcgaagctgaaaccgaatttgctctcttcttgtgctatgtgcagttgaagcaggcagtttacggttcgtccggccttggctgcctgcctgttgatttcggtaaggagtttgtaggaatccactccatgaatcagagtaacatagggtacgatatatttgattttattcgtttgcagatgtccgatgaaatgccattcgatatcttttggaaggctctcgtatttggcagtcatttcctgcaccttgctttctccgaacacacgctgccctgcgctataagcttcctctatggcctcgttggggtgaaatttggaaacagctaccagccgcaccccatcaggtagttcgctcagtacttgttttatgttttctgcaatactcatcgtatatatgataatctgtgaaatgaaattttcaggttcttatacttccggcttgtcatccggttctgcgctgtacggatatacatccatgatggcggtttccgctaccgatgcaatttggtagtcggccattgtgcctttcatgccctcatccagcttctttaccgcatcacgcaagtcggctgcctgcaccaatacctgggtagacgtttttttctcagcaccgcttttctcgtccaatgtaatgaaaaccagcttgcatttgaaccaacggtcggcagcttcctcttcgcatggaaacagttcgctgtagttggcacgtttgatgtccgataccgtgaattctcctgaaataaacggtgtcatctcttcgatgatacgtgcttccgcttccgtaaaactgagtgcatctaccagataaggttcggtaacttttttgttcattccgttttccattgttttttcataacggattttacactcaaaccatgtatgcattgccataatcttctgattttagttagtattttaattagtaaacgattgtttcctcttcctgccttttgcggcttgcagaagaaacccttcccttttttatcatgaaaggatgtacaaagataaacgaaaaaggggaaaaaagtttgatatagccggaagaagattatgttaatgcaaaactttttatctgtttggcgtctgtttgggaacaaacccgtattttgaaaacagttggcaaaggatatgacggaccggttggctattttattggaataaccgttctttggcggcgttaaaccaataaaacaacaacaagatttatggcagtagtagcttatttaagagtaagtacagaaaaacagtttttggaaaaccagcgagaggaaattgtacgcttcgcagaaaggaacgggatgagtattgataagtggtatacggaaacggtcagcggaagcgtcagcagtaaagaacgtaagttgtcgggggtgttggataagatgcgtccaggcgattctttgattgttacggagatatcacggctcagccgtacgctgcttgagattatgactattctcaattcgtgtataaaaaagggggtgatattgtatagcaccaaagagggatacgtttttcagaatgacattaacagcaaagtgctggggtttgcattcggactgatggccgagatagagcgtaatctgatttcaatgcgtactaaagaggcgctggcccgtagaaagcaggaaggaaagcacttggggcgtaaaaagggggatatgcctaagatgaagatacttgcggagaataagaaacaattgcttaaagagcagaagaaaggaacatcctgctctgaactcgcccggcggatgggagtgtccagaacaaccatgttccgttttctgcatcataaaagataaaccggaagtctctaaccgggatgtgctgtgattcactgcggattatgccgattattacagacggattttaagcgtccgaggcttactcaagaatatctaatctgtacatatctgtgtaatctgtggcgaattaagagttccggaaacttcgtttgtgcagattcttcagttcgaaagagagcatgatacggaagaatcctatgataaggaatgcaaacgaaatcatataaacggcgtagatagctccgaccgtcggttgccacaggataataagcgagcatacgatggcaaggatgccgaatgctgtataccagccccactcttttgtcccgtacctctttaagtccattgcatagcctaccgaggaaaatccccggaacatcagccagaaggcgatgataaacggaatgacttccatgctcagcacaggataagtcaccaggtagagtcccaaaatcatatcaatgactcctcctgccaggtaccagccccagctggataccctttggcggttgcttactgcaaaggcaatttccagcaaaccgctgaccagcatcgagatgctgaataaaatactcaatgcggcatatccgttaaaagggaagaacattagccccagagctacggctacatacaggatgccgagaataagtgaaacccaccagttttttacttcctgtttcagctcatcaaaaattgttttcatgtaaatcttaatttaaaagtgattattataagttcgttgggggaataacaatctgtggtatgaaaagttttattgaactttttcagcatcccgtttgtttctctattgtataaattgataaaattatggctacaacaaaatttaagggacaaccggtaaaagttatcggtgagtttataaaagtaggagcagtcgctcctgatttcgagttggtaaagacggatttatcttctttctctttgaaagaactgaacgggaagaatgtaattcttaatatttttccgagtctggataccggcgtttgtgctgcttccgtacgcaaattcaatgaattggctgccggtttgccggatacggtggtattggctgtttcaaaggacctgccttttgcacatgcccgtttttgtacgacggaaggtattgagaacgtaattcccttgtccgatttccgttgctcggattttgatgaaaactatggcgtgcgtatggcagacggaccgttaagcggtttgctggcgcgggcggtgattgttgtcggtaaagatggaaagattgcctatacagaactcgtaccggagattacgcaagagccggactatgaaaaggcgattgcggcagttaggaaataaccgcttgggacttaactatacaataaaaaaacggtggatgaagaaggactgtctttatccaccgttttttattcttattttttctgttttattcctttataaatcaggaaacctacaacgaatatcgcaactgccagaatgatataaccgatttcgtggctgtattccgtagccaatatatagacatcgttggttgtcttgatgtctgtgaaccggtatataaaatagccgagcagcgccagtatcgtgttccagattcccgcaccgagcgttgtgtaaagcaggaacgagcctaatttcatgccggcgagtccggccggaatactgataagctgccgtactgcggggataagacgtccgaagaatgtggatgcggcgccatgcttcctgaagtactcttcggcatggcgtactttcgcttcgtcaatcaggcacatatgcccgaaacggctgttggcaaatttatagacaataggacgacccagccaacgtgcaagatagtagtttatgagtgcgccgagatctgcgccgatggttgcgaaaataacgacaaggaagatattcatactgtcatcggtcatcgctttccatgcagccggcggcactataacttccgatggaaatgggataaatgaactttcgatagtcatgaagatggtaactacccaataattcagattttctaaaacccatttgataagttctgcagatgattccatatataatacttgtgattaataatttgtttatgtctttaaaataaacctgacccgccaaatatctctttcactctttttatcatttcatcccggtttttacagtccagcaaatccagcatgttttccaggtcttttgcctgaaacgggtgtgcgcaaagctggttgtactttaggaagttctccatgtcgtcaagtaacagataaagggcggtcagcttctcgttgatattctcgaagtcgggctccagtttcttaacctgctcaaaagccgtttgggcatattgtatatggcccgtttccatgctgctcatgccgatttcattccaagtatcggcacacggggcacactctaaagccaaagcccatttctttacagccttgtcgaaatctcctttttccatatacatacctccctcaatcagatagggctctgcatctttcgggcctatctcatgggctttcttgaaaaacaggtcggcctgacgcttttcgcctaagttatagaggcaaatcgctacatgcgcatataaagacggcaacatcgttgagtcggtatctttactgtgtatgaccaattcaagatgccggtacccttcttcccagtgtcctttggatatttcattgaatccgatgaacatatgaaggaaattggggctgacggctttgtatttttctgccagagtataattttcaagcgcgctttcttcatttccaagttgatagaaagcatgtcctttcatcatataggcatcggcaaattcttcatctgacacgattgcatagtcgcacgcctcaatggctttgtcaaacagttgctgttcgaaatagcaacgtgccagtccgaaccaataaggggctgaataaggattcttgtctatcagcttgttatagaacatttcggctttatccttcagaccttgtgccaggaaacagtcggctgttacggccagatactcttcttcctcggcatatttttccaatccccttgtcagccatggtacagccttatcgggataccccatatcaatatacatataggatacgtccacgatgttggccaagtcctctttgtcttctatggagtcaaggagttgttccgcttcatctattttgccttcgcctaagagaatattggctttaagcacttttacttccgaggaataatcttcggttatttcctctatcacttgtttggccttatccctttcccgggcgtccatgaagagataagcctgctctaccaacagaggcgtactgccggggtgtaagctcagcccgtattctacgacttcggtagcctggctgttttttctgtgcatggcataccagtcggcaaggtcggctaaatcgtctgcatccagatagataggtttgttctcagctttcgctgcttcgtattgttctgcaagttcttgcaattccttgtctcttccggacaacaggttctttttactcattaatgttatattatttgttgattttcccccaagtatctttcaagcctacggtacggttgaacaccattttctccggtgtagagtcgcggtctacattgaagtaaccgatgcgctggaactgcaggtaggagaggggcttcataccggcggcaaatttctcgatatagcagcatggcaatacgttcagagaatccggatttatcatttccttcatggcggtcagcgcatcgcaattcttttcttcgcggatggctgccagttcgtcgcgcggattttccactttccacaaccggtcgtaaaggcggacttcggcttgcaggcagtgtgcgcagctcacccagtgaatcgtgccttttactttgcggttagcgccgggcatgccgcttttgctgtcggggtcgtattcgcagtatacttctgtgatttctcctgcatcgttcttcttgcagccggtacacttcacgatgtacgcgcttttcaggcgaacttcctgtccgggagtcatgcggaaatatttcttcggagcatcttccatgaaatcgtcgcgttctatccacagttcgcggctgaattcgatgttgtggctgccctcttccggacgttccgggttgttgacggcttccatttcctcaacctgtccttccggataattggtgatgacaagcttcaccggattcaatactgcggatatgcgggtggcgcgtgcgttcaagtcttcgcgtacggcgctctccagcaaggcaaattcattgagggcatcgtaggtggtataaccgattttatcgatgaacttatgaatggattcgggtgaatagccgcgacggcggaaaccgcagatagtcggcatacgggggtcgtcccagccgttgacaaggccttctttcaccaaagtcagcaggttgcgcttgctcatgagtgtatagctcaggttgagcttgttgaattcgtactggtgaggacggtggtcgttcaggtccttgccttcttttacccaatctacaaagaggtcgtacaacggacggtggggaacgaattccagtgtacacaaggagtgggttacaccttcgaagtagtcgctttgtccgtgagcgaagtcgtacatcgggtaagctttccaggtagtacccgtacggtggtgcggatgtttcaccacgcgatagataatcgggtcgcggaagtgcatgttgggacttgccatgtcaattttggcacggagcaccatggcgccttcctctatctcgccggtattcatcttttggaacagttcgagtgtttcctcgatgggacggttacggtaagggctttccacaccgggttgggtaggagtgcctttttgagcggcaatctgctcggatgtctgctcgtcgatatatgctttgccttctttgatgaggcggatggcgaagtcccataactgctggaagtagtcggaggcatagtattcgttgccccactggtaacccagccattgaatatcttccttgatggcttccacatattccacatcttctttggtggggttggtgtcatcgaaacgcaggttgcagaccccgccatgtgtggcggcaatgccgaagtccaggcaaatggccttggcatgtccgatgtgaagataaccgttaggttccggcgggaaacgtgtctgtacctttccgtcgtttttaccctctttcaagtcgttctctactatttgttcaatgaagttcaggctcttcttttcgcttgtttcttcgctttttatttctgccataatgctattgttattcgtatagtggtgcaaaaatacgactattttttcgtatatcgttatttcacgggaatatatccgctcttttttagtgatttcctgtccggaaagcggcagacacgaaccgtagactccggcttgtgaaagccggagttttttgcatgcgaattaaagcaacgtatgttacatacttgttacacacggcgggtttgtgtgtattgtaacggttttgtaacatgtttgaaacatttccttcaaacgatagtcatactgccttaatatttcctttgtttctttgtacgcggaaaaacgtaggcaatatgaaaaaaataccacgtgccggtacggggcatttcacggcatggtacttctcgtaccacgcgttggtacagacactaccaccctttggtacagtgagtttcatgccgtggtacgggcgataccatgccttggtacggacagtttcatgcgttggaacaagtgatatgattaggcaattgataattttgaaatagaaaaacattatggtgcagtttatcgaatcagagctcgtcttgctgaaaaaagaaatagacgaaatgtggactttagtgtataatcagctcggccgtgccggagaagccgtactgactttggatcgcgagctggcacagcaggtattggtgcgcgagcgtcgtgtcaatgccttcgaactcaagatagacagtgatatagaagacatcatcgccctctataatcctgtcgctatcgacttgcgttttgtgcttgccatgctcaaaatcaatacgaacctggagcgtttgggcgatttcgccgaaggcatagcccgctttgcgttgaattgcaaggaaccgattctggcaagcggactggtgaaggaactgcgcctggaggagatgataaatcaagtttcggctatgcttgaacttgccaaaagagctcttcaggaagaaagtcaggaactggcaaccgcggtattcgccaaagataacctgctggatgaaattaatgcaaatgccactgctgttctggcagattatatcggcaagcatcccgaaagcgcactctcttgtctgaatctggttagtgttttccgtaagctggaacgttccggcgatcatattacgaatatcgccgaggaaatagtgttttttatcgatgcgaaggtgctgaaacatagcggacgtacggacgagcactatgcagacgataagaaatagtcaactttttaggatatttttagtgtttaatggaaaatagccctatatttgcccattgaaaacgattgcagatgtagaaatttgctttgaaatgataataaaatcaaaagaattacagaaaagatgttataagacatgttttttaatttggttggtatcttgaaaagcggctatctttgcaacgttatcctgaaaacaatctttttaccttaaaaaaaactaatacctattgaaaactgaaaaaggaggctttgtgaaaagcttcctttttttcatttctatatgagaccctttttgtatctttgtcgcatccgcaatgcgggtaatatctaaatttaaattgtaacaaacttatgttttccggaatagtagaagaatgtgccacactggtggctatggtcagagaccaagaaaacgtgcactttactttcaagtgttcgttcgtaaatgaattaaaaatagaccagagcgtatctcataatggcgtatgccttacggttgtcagcatgacggatgatacttatacggtgacggcgatgaaagagactctggaccgttccaatctcggcttgttgaaagtaggcgatgaagtgaacgtggagcgcagcatgatgatgaacggccgcttggacggacacatcgtacagggacacgtggaccaaacggcaacctgtgtggacataaaggatgccgaaggcagctattactttacgttccggtatgcctttgataaggaaatggcgaagcgcggttatatcaccgtggataaaggctcggtaaccgtaaacggtgtcagcctgaccgtgtgcaaccctacggacgatacctttcaggtagccattatcccttataccttcgagcataccaatttccacgctttcaaggtgggtagcgtagtgaatctcgaattcgatattatcggtaaatatatcagcagaatgatacagtataaatagagttataactcataatttataattcataactcatatcttattatgaatgattttttgcaattggccgcttcacgtcaaagcgaccgtgcttatgatatgtcccgtgcggtagagccggagaagttggaacgtattttggaagctgcccggctgtcgccttcggcatgcaatgcccagccgtggcgttttgtggtgatcaccgatccggagcttgctgtaaaagtgggtaaggccactgccggattggggatgaataagtttgccaaagatgctccggtacatattctggtggtggaagaatccatgaatatcacttctttcttgggcgccaagattaaggacaagtatttccctctgatagatatcggcattgccaccgctcatattacgctggctgccgaaagcgaggggctgggttcgtgcatcctgggctggttcgatgaaaaggagattaagaagcttaccggtattcctgccaataaacgtctgttgctcgacatcacgataggctatccggcaaaagacaaacggaagaagtccaggaaatccaaggacaaggttgtttcatacaaccattattaaagctaccgttacaggtctttcagcagcacttggcttgcactcttgtagtactcttcccgtgctttcatcagtgtttcccattgcccgtggaattctttgtccttgtctatcttgaagtcctcggagccgtgggtgtccagcttgtccagcaggagagcaacgttcagcttgctgatgtccatggaaggctggtaggcgatgtcctggcttttggcatcggtcaccacttcgtgcagaaggttgatttcctgcaattcataaagagtctggttggtcaggcgtatgggtatctggcactcctcggatatgtcttcggcagtatagggaggttcgttcttttcaaagcgtttggctacgaacgacatgatgaggatggagatgaagtcgcggtaacggcggctgatgttgcgtgcatccttatcgaaactgaagttccggatgttttgtccggcatacgtcagttccgctccgaaaaggcagatggtccacgatatctgcaaccacagcaggaacatgggaagtgccgcaaaactaccgtaaatggcgttgtaacgggatacccacaactggctgctgatataaaggaactggaatgcctggtgtgccgtacctgccagaatgcccgaaatcagcgcatgcttgagtttcacctttgtattgggcatgaaaacatacagtgccgtgaacatcacccatgtcagcacaaaaggtatgaggcggattaggaatttgccgatgggagcgagcagggtgaagtctgtcacattcttcagcatggtgctcataaatatggaaagaccgcccgaaactaccagcagaaggggtatcagtaggagcatggagaagtaatccgtgattttacggtacatgcttcttgctttttttacctgccagatgcggttgaaggtaatctccatgttgttaatcaggttgagcaccgtccacaataacatgatcaggcccacgccgatgaatatgccgtttttggtttgagatagataggagttgacgaattggaagataacttccgttgtttccgacgggccgccgaagccttgaacgatttgactctccatcagattgtcgaagccgaacccgcgtgcaatggcaaacacaatggccaggataggtacaatagccagtaaagtgctatatgtcaatgccgatgccttgtttacaagcctgtctttggtaaagcggttgatgcagagataaatggtcttgataatattatataaggagaaagtcgttttagtgacttcatcttctgtaatacgccagatgtcgtatgtcaggaatttccaaagggtggcaatgcgcttgttcatgctaaattgaaaaatgagaatcgagaattgaaaaacgatagtatgccaaaaggactttatttcttaattctcaatttttaatttttaatttaaaaaagcagtcggtctgtaagccgggttctgttccctgattcagcaattaaatcaaggcgtctgtcatttatctgagccgtatgttgccatacaggctttagcggtctaccctccgacatggagcgagcaactctcataacgtcggtttacatgaccttacaactcctaagacgtacggcccttgtgtcgccacaaggccggtgggctcttaccccaccttctcacccttaccacaaccccggaaggcatggcggttattttcttctacgttactctaccctcgcggacagctttctgttaggaagtaggatgctctgtgttgcccggactttcctcatgcgcacgaggcgcaagcgacagaccgaccaactgctttggggtgcaaagataggaattttttagtgattgacgtcaggtgaccggtgatttgttcgttatcggtgttttatttgtgtaatttcttaaaaacactgaaaatatgtatctcttttagaataaattgttagctttgctaacattaataattcccaaatgcgtatagtccatgaaaaagtttgcctcattctttgcagtatttctctttataactctttttgctgtcgcttcggaagccggagaccgtaatataccggtagaggtggcacaactcaccgacagtttgaaaaaacagtttgcaccggacaggcgtgtggcattgctggatgtagattattctttttccgataagaatgtgatgctgcgtggcgtcactacttcggcagaagcgaaaaacgcattgttgaaggaactggcaagaaaaggctatgccgtgatggactgtcttgaactgcttcccgatgtgaaggggctggaaggcaaaacctgcggtattatcaatgtgtctgtggcaaatatgcgtgtcgctccggatttctcatcggaaatgatgacacagagtctgatggggatgccagtgcgcgtattgcagcgcgatggctgggtgcgtatccagactcccgacaattatatcgcctgggtgcatcgtgtaggtgtacatccggtgaccgaagaagaaatggccgcgtggaacaaggcggaaaagatcgttgtgactgctcattacggttttgtctattccgaaccgaaccaaacttcacaaacggtttcggacgttgtggccggcaaccgtttgaagtgggaagggagcaagggagctttctacaaggtgacctatcccgacggtcgccggggatacatctccaaatccatagccatgcccgagaagaaatggcgttccggcttgcagcaggatgccgccggcattatccgtacggcacacaccatgatggggataccttatctttgggcgggaacttcatcgaaaggcgtggattgcagcggattcatgcgcaccatactttttatgcacgacatcattataccacgtgatgcttcccagcaggcttatgtgggcgagcatatagacattgcagccgatttttccaacctgcaaccgggcgatttgatattcttcggccgcaaggcaactccggaacgtaaagaacgggtcgtacacgtgggtatgtatattggcggcaagcgtttcattcattcgcagggcgatgtgcatatcagcagtttcgacccggcagatgaattgttcgatgagtacaatctcggacggttactgttcgctacgcgcgtattaccttatataaataaggaagagggattaaacacaacggaaaccaatgaatactataaatgacatgcaaaacagaagagactttttaaagaccgccgcctttgccgccttaggttcgggtatggctatcaatagcgtattggcaggtgagggtgcggcgcctgctttgttcaatatcaataagagtggcgttacgcctaaaatgaagctgcgtttcttttcgtatgaactgaggttgcgtcatgtgtttacggtggctgcttattcgcgcaccaccactcccgatgtgcaggtcgaaatagagtatgacggcatcatcggttatggcgaagcttccatgccgccctacctgcagcacgaattgggcacgatggacagcgtactggctttcttgaagaaagtgcaggatgttatcgggcagttctccgaccctttccggctggaagatatcctgagttatatagacagtctctctgcaggagattcggcggccaagactgcggtggatattgccttgcacgatttggtgggtaaattgttgcaggtcccctggtataaaatctggggattggataaggagaaagcgccttctaccacctttaccatcggtattgatacgcccgatgtggtgcgtgaaaagactaaagagtgtgccgggcagttcaatatcctgaaagtgaagctggggcgcgacaacgataaggagatgatcgagaccatccgttcggtaactgacctgcctatcgccattgacgccaatcagggctggaaagacaaacattatgcgcttgatatgattcactggctgaaagagaaaggcattgtgatgatagagcagcccatgcctaaagagcagttggatgatattgcgtgggtaaccgggcaaagtccgttgccggtatttgcagatgaatccgtccaacgcttaaaggatatagtagggctgaaagatgcttttaccggcatcaatatcaagctgatgaaatgtaccggtatgcgtgaagcgtggaagatggtgacactggcgcgtgctttgggcatgaaagtaatggtggggtgcatgaccgaaacttcgtgtgctatttctgcggccgcacaattctctccggcagttgattttgccgatttggacggcagtctgctgatagccaacgaccgtttcaagggaatggaagttgtaaagggaaagattacactgccggacttgccgggtattggagtcgtgaagatataaaagtacggaaatcatacggtgacaggtgctcctgatataaactgatttacttatataatccatgaagaatctgctatatattgtctttttgtttgtttttgtttctgcttgcagcacgaagccggagaacaggccatactgttgggatgatgatttgcaccggcgtctgcttacggatttttgtttgacggaatctcaggtcaaggactatatcagaaagtatattcctgatgtaacggacgaacagatgcggcagtgggaagtatccaatgctttggagtgtatggttctggatggtgaaaaacgctatttccgtaatgccggtcctaatctgtttcgtgtggattctgcctgctatgatataaagatagccaaagagggcactgctctaagcggaagtgagaaggtgaacaaagaaaatctgcccgaagtgattactgccgtgaagaaagaaaacaaggcgatagtcgctcccaagcggatgcgtgtcacttatacgctgacgatagacaccaatgccgttcctgccggaaagctggttcgctgctggttgccttatccccgtaccgaccaggcccggcagcgggatgtgaagttcatctctgccagtgagccggactatgtcctttctccacaagagtgccggcatagcacgctctatatggaaaagcgtgcggtacagggagagcctaccgtattttccgaaacatttgaatatacatcctgcggagagtggcataatctgcgcgcggaagatgttctgccttatgatacgactaccgctctttataaagagtataccgccgagcgggagaaacacatcgtcttctctccgcggctgcgtgagttggctgccaagttgacagcaggtgaaaccaatccttatttaaaggcgaagcgcatcttccgttggattaacgatcacttcccctgggcatctgcccgcgagtattccacgattgagaatattccggaatatgtattggacaaccatcacggcgattgcggtcaggtcagccttttattcataaccttatgccgcatcagcggtattcccgcacattttcagagcgggttcatgatgcatccccgtgcttggaacctgcacgattgggcggaagtatattttgaaggtgttgggtgggtgcctgtagaccaatcgttcggaatcccggcttttgcccgcaatgccgatgaagagtatttcttcctgggtggtatcgactcctggcgcatgattgtaaataccgattacggcatgccgttagtgcctgaaaagaagtatccgcgtagcgaaaccgtagatttccagcgcggtgaggtagagtgggaaggtggaaacctttattttccgcaatggagttaccatatggacatcgattaccttaattattaaggcatggcatacaacttgaaaacagatgatgtgttgaggcgaaacgcatcatctgttgaacctcaacgcatcatccgttacaggcaaacggatggtgcgtttttgttttgtctatctgtcagtcttttaacagacagtaatcgtgcataaatgctaatttgtcagcttctgccgttaaccgctgttaagtcccaaatattcactgttaaaagagaacaaaaaagagtgacaagcggaataacagaacgatttttgtcgttattttaacgtcagaatgttaaatgagatttgaatattaacaattaaagaaaatagaaagtaatatgaaacagacaacaaaaaacatccttggagttgcagccattgtagttctgagtgcaggagtggccggtgttaccacttataagatgcagaataaggaaaagtctgctacattcagcgaattgttccagcagaaccctaataatttacggttggctgcttataacgcgacggatgcgcagcctgttgacctgacgcaagcggcagaaagttcggttcatgccgtagtacatatacgtgccaaacagttgagcaagactcagacagtgcagagcatgccggatatttttgacttcttcttcggtgacggtcgcggacagcagcgtcagatacagacccaaccgcgcgtaggtttcggctccggcgtgattatttccaaagacggctatatcgtaaccaacaaccacgtggttgagggtgctgatgaaattaccgtgaaactgaacgatgaccgcgaactgaaaggccgcatcattggtactgaccccagcaccgaccttgcgctgattaagattgagggtgacgatttccccacagtaccggtaggcaactccgacgaactgaaagtaggtgagtgggtgttggcggtaggtaacccgttcaacctgaactctaccgtaacagccggtatcgtcagtgcaaaggctcgtgccatcggcgcaacggcttccaacggacaggctgcgaatatccagtctttcatccagacggatgctgccatcaatcagggcaacagtggcggtgcgctggttaatgcaagaggtgagctggtaggtatcaacgccatgctgtattcaccgacaggtgcatactccggctacggctttgcaatccccaccagcatcatgacgaaagttgtagcggacttgaagcagttcggtacggtacagcgtgctttgctgggtattaccggtactacactgggcacagacctgcaaatggacgaaagactggctgaggaaatgaagaagaaagccgacgaactcggtgtgaaggaaggtgtcttgattgccgaagttgtagagggtggttctgctgccggtgtgttgaagtcggatgacgttatcgtcggtattgacggtaagaaggtgcataagtttaccgatttgcaggaagtgctggctaagcatcgtccgggcgataaagtaaaggtgaaggtaatccgtgacaagaaagagaaagagtttgtattgacgctgaagaactctcaaggcaatacgaaagtagtgaaagatgccggaatggaactgttgggtgcagctttcaagcctgtatcttccgaattgaagagacaacttaacttgggttacggtttggaagtaaccggagtgtccaacggtaaaatggcagatgccggtatccgtaagggattcatcatcctcaaagcgaacaatgtacagatgaagtcggtagaggatctggagcaggtactgaaggctgccgcccaatctcccgaacaagtgttgtttatcaccggtatgttcccgtcgggcaagcgtgcaagttatgctgttgatttgagccaggaataacaaaaacatgataatcaggtaagaagattgtaatataagcaaagaaagatgaaaaaaaggtgtcggtgaatacttaccgacatcttttttgttgtataagtaaggtataaataaggtgaaaaagtttcggcatgttagtgttgtaataaataatttgtcgtaactttgcaacccaaatctgtattataagaatgagacaactaaaaattaccaaaagtatcactaacagagagagcgcttctcttgacaagtatttgcaggaaatcggtcgcgaagacctcattacagtcgaagaagaggtagagctcgctcagcgcatccgcaagggtgaccgtgttgcactggagaaattgacacgtgccaatctgcgtttcgttgtatctgtagccaaacagtaccagaaccaaggtttgagtttgcccgacttgattaacgagggtaatttaggactgattaaggctgccgaaaagttcgatgagacacgtggtttcaagttcatcagttatgcagtatggtggatacgtcagtccattttgcaggctttggcagagcagtcgcgtattgtgcgtcttcccttgaaccaggtaggctcgctgaataaaatcagcaaggctttctccaagttcgagcaggaaaacgaacgccgcccgtcgcccgaagaacttgccgatgaactggaaatccctgttgacaaaatctccgatacgctgaaggtttccggccgccatatttcggtagacgcgccttttgttgaaggagaagacaacagcttgctcgatgtgctggtcaacgacgactctcctatggccgaccgctctttggtgaacgagtctcttgcgagggaaattgatagagctctttctacgttaaccgatagggaaaaagaaatcatacagatgtttttcggtatcggacagcaggaaatgacattagaggaaatcggcgacaaattcggtctcacacgtgagcgtgtccgccagattaaggaaaaagcaatcagaagattaagacaaagtaatcgtagtaaattgctcaaatcttatttgggataaataagaatatcggtttctgacaaataaaagaaattaagaaaaccggtctgtccagagtggatggccggtttttttattatctttgccccattaaacaatcaaaaagaagttatgaagcacataaaaatagtatttgcagtgatgctcgtatttactttgtgtacagcgtttacaatgaaaagccataagcctgtttatgcttttggcgtagcggcgtctttcaatgattcggtagtgtattgcacggaaatccaagtattggacagtacggcactggacaagaacggttttttgcccaagcgtgacttgtacagctatcaattgaaaaactatctggaatacgatttgaagaaacccgattatacgtgtatgatctatttcagtgagaataaaaagaaactggaaaaggaagctgtcaaggtaaaggcgaagtataagaagagcacaatggtgttgcaggctattacgtcggataagttcagttttaagaagccggaagagtaatcggtgcgttgcaacaattatacgatacctatgagaatgaagctttatacattgctgtgcatatcttttttccttttgtttacggcttgtaatcaagatgatgatccggtgccacctgaggtaggaagtagaaccgtgcttgtttacattgtagcggataataacttgtcgtcatttgcgaaggaagatgtggaagagatgattgcaggcatggaatccgttgatttgtcatccagtaacttgctggtatatcaggatgacagggtagcaccagttttgttccggatctctagaaacaagaaagggcgtttggagaaggagataatcaaggagtatgcagagcaggtatccacgaaggcctctgtgatgaaggaggtaatgcaccgtgctttctatgaatatccggcagacagttacggtttggtttactggtcgcacgcagacggctggattccttatccggtaccttcggcttctacacgctggatagggcaggatacaggagaggggcaggataaccgtatgaatatatctgactttgttgatgtattggatgacgggatgcctcactttgactttataatgtttgacgcatgctttatgatgtctgtagaagtggcttatgaggtgcgtaattataccgattattatatcggttcgcctacggagaatccgggtccgggcgctccttatgacaaggttgttccttatatgtttaaaccgggcgcggctgcacaaatggcagaagcctactttaatcattataaggataattataaagcaggagagggtatctcgaatgcaaactggacaggcggaacttccatttgcgctgtaaggacagatgcgttggatgatttggcggatgtgacagggcaactcttggagcgcgcggacaacgaaagcgtgccttcttttaatacggtgtttgattatgataagcgggatatggaagaaggacatgtcggttactatgatttctcgcagatgatggaaatgcggctggatgccgatgcttatgttgcttggaagaatgtgtttgatgcttctattgtctattggaatactacagataaaaattactccatgttcaaaagaatgttttcaatggaaggaacaaacggcattacgcattatatccccctttcggttgattccaaagctgctgaggcttaccgttccatggcttggtataaagctgcgggactcgaaaatatgggctggtagtatgtagtaggaatagaaaggactttgaatatgatatggttataatggagatgcgtccgagaggatgcatctctttttttatgtttttcgttatattttataacttgcaatgattaaactgcatgtttttaataatagcttattcttcttgttatacaggtataatatattattaaatagtatattaacattattttcctaaggaaactattttatattggaaattattacttcctttgcagtatcaaactaaaaagaaagaaatatgaaatatgtaattatcggtggcgttgcaggtggagccacggctgctgcccggttaagaagaatagatgagcaagctgaaatcattttattggagaaaggcaaatacatttcctatgccaattgcggattaccttattatataggcggtgttatcgccgatcgcgaaaaactattggttcagactcccgcatcattcggtaaacgtttccgtatcgatgtgcgggtagagaacgaagtaatcgcaatcgatccggaaaagaaaacattgactatccgtaaagcagatggaaaggaatatgaagaaacctatgacaaacttctgctttctccgggagccaatccggtgaaaccgcctttggaaggcattgactcggaaggtatctttacgcttcgcaatgtagaagataccgaccggattaaggcttatatcacagacaagcaagtaaaacgcgcagttgtagtaggcgcaggcttcatcggacttgagatggcggaaaacctgcatcatgcgggcgttacggtttctgttgtagagatgggcaatcaggttatggcgcctatcgacttctccatggctgcacctattcaccggcatctgatcgaaaaaggcgtttctctttatctggaagagggcgttacccgtttccggcgtactgaagagggaattaccgtttttctgaaaagcggaaaaacgattcctgccgatatggtattgctttctatcggtgtgcgtccggcaacggcattggcgcaacaggcaggtttggagttgggcgaaacgggcggtatccgggtagacgagcacttggaaacttccgtaaaagacatctatgctgtgggcgatgccattgaatatccccatccgctgaccggaaaaccgtggctcaactatctggccaatccggcaaaccgtcagggacgcatcgttgccgataatatggccttgggcaataccacatcctacgaaggagctatcggtacatccatcgccaaagtctttgatatgacggtagcttctaccggacttgccgccaagcgtctgaaacaatggggtatggagtatcaaagctcggtaacccattctgcttcgcatgcaggttattatcccgatgcgttgcctctgaccttgaaactgacgttccatccgaaaaccggaaaactctatggtgcgcaatgcgtaggctacgagggagtggataagcgcatcgaccagatagcgggacttatcaaacatggcggaaccgtttacgatttgatggaaacggagcacacctatgcaccgcctttctcatcggcaaaagaccctattgccatagccggatacgtggcttccaatattatcagcggcgccatgccggttatttcctggcgcgaactggcagagaagaaagacgaagtaatgctgatagatacccgtacccctgaagaattctcgttcggaacgattccgggagctgtcaatatcccgctggacgagatgcgcgaccgtttgtcggaaataccggcggataagcccgtcgtgcttttctgtgccgtaggtttgcgcggatatttggcacaacgtattctgataggacgcggttatcgcaatacggccaacttgataggcggatataagacctattctacagcagtggcgcccattcctgctcctacggcatcatcgccggctcagcctgctgcatccgctccgtcgcaatcggcacagagcggttctgccaaagagcctttgagggttaatgcctgcggcctgcaatgtcccggccctatcatgcaggtaaagaaagccatggacagcatcgctccgggcgagcgggtggaaattgtggcgaccgatgccggattcgcacgtgatgcttctgcctggtgtgccactacgggcaacaagctgatagagaaaaaggaagaaaaaggacgctacacggtattgcttgaaaaaggcgatgaggcttgtgcctgcccgtcgtctcttccggcagcaggcggacggggaaaaactttaattctttttagcgatgatttagacaaggctttagctacctttgtactcgctaacggcgcagcggcaaccggacagaaagtgtcgatattcttcaccttctggggattgaatgtcttgaagaagatacagaaaccccggacagagaaagatattttcggaaagatgttcggtatgatgcttccgtccagttcattgcggctgaaactgtccaagatgaatatgatgggcttgggcagcaggatgatgcgcttcctgatgaagcggaaaggaatagattctttggaatcgttgcgttctcaggcgttggcgcaaggagttgagtttattgcttgtcagatgtctatggatatgatgggcatccggcgcgaagaattgctggacgaagttaccataggcggtgtggcgacctatatggagcgcgcggacaaggcgaatgtgaatctatttatataaacggaataatggaaactttatgtagaatccgcgatatttaccgggcgatagccgagtttgaagtaaaattcatgcaggagtttgacttgtcgttgaatgagggtatgctgttgtgtaccctgctcaatacgcccaaactcacctccagcgagatagcggaagcgctcggactgtcagcttccaatacttccaaggtaatccgctcggtagaggacaagaagctgattacccgactggtgggaaaaacggataagcgtcagatgcactttgcgctgacgccggaagggaagagccgtattacggtcattaaaaacagcactcccgaaattccggccctattgcaggagattgtttagggagaggctttccggtttattcatggtgatacggcccgccgttcagtatggtcatggcacggtataactgctccacaaagataagtcttatcatctgatgcgaaaaggtcatgcgcgaaagagacagcttttcgtgtgccgcttcatagactttgggggagaagccgtaagggccgccaataataaaaaccagccgtttgtttacggtgttcatcttgcgcttcatatagtctgcgaactctatggagcgcatttcttttccgccctcatccagtagcaccaccacatcgcccggttggagcgctttcagtatcagttcgccctctttttctttttgtacgtccgcggagaggcttttggtatttttcagttccgggataacttccatatcgaacgagagatagcgtcgcgtgcgctgtatgtagtcattgatggctgtaataaagtgctgttctacggttcgtcctacgacgagcaaggtcattttcatatgaattactgattttcgtgcaaaaataatcctttcctgtgagaatgtcgcttttcttttcttgttatttataagatttgcttacctttgcctatcattaatacttgtgaaaatgaataaacgagtagtaatattatggctctgcttctttgtctggacagtttcgcttatggcacaagacgtaccggcaggagtggtcgccgcctttaaaaaaggaaattctcaggaactgaacgggtatctgagtgataaagtggaactgattctggagagtcgttcaatcaatgtcgacaaccaagcggcagagaaaaagatggcatctttcttttccggtaatcgggtgagcggttttacggtgaatcaccagggaaagcgcaatgagtcgagtttcatagtcggtacgttgacaaccgcgaacggaaacttccgggtgaattgtttctttagaaaagtggcaggcaaatatgtgatacaccaaataagaatagataagacaaatgaataaggaagaagaattgattgacaggctgattgacctggcctttgccgaagatataggcgatggtgaccacaccaccctttcgtgcattcctgctacggcaatgggcaaatccaagcttttgattaaagaagccggtattcttgccggtatcgaggttgctaaagaagtgttccgtcgtttcgaccccaccatgaaagtggaagtattcatcaatgacggcactgaagtgaagccgggcgacgtggctatggttgtggaaggcaaggtgcagtctttgttgcagaccgaacgcctgatgctgaacattatgcagcgtatgagcggcatcgctaccatgacccataagtatgccgagaagctgaaaggtacgaatacccgtgtgctcgatacccgtaagacgactccgggcatgcgtattctggagaagatggctgtgaagataggtggcggcgtgaaccatcgaatcggtctgttcgacatgattctgctgaaagacaatcatgttgacttcgccggcggtatcgacaaggccattacccgtgccaaggaatattgcaaggagaagggcaaggacctcaagatagaaattgaagtacgcaacttcgacgaactgcaacaggtactcgatttgggcggcgtagaccgtatcatgttcgataactttacacccgaaatgacgaagaaagccgtagaaatggtagcaggccgttatgaaacggaatcttccggcggcatcacctttgacacactgcgcgactatgccgaatgcggcgtagactttatctcggtaggtgctttgacgcattccgtaaaaggattggacatgagcttcaaagcctgctgataaaggcgatataatacaggagaaagcctctcatagggaatgctgcccgtcagggcaggtctgtgagaggcttttttcttatgttataaagggcaaatgatgaaacggaaagatatggataaccttattctttaacttctttttagagattctattgcagcattctgccggatgctgcgtctaaccaacaaacgacgcgaagaggcgtccgtaaaacgagcactgacattggaaaatgagatagaactgatagagggctgccgggcaggaaaggattccgcccgaaaggaactttacactctctattccaagcagatgctggcggtatgctaccgttatacgggcgatatggatgcggcgcacgatgttttgcacgatggctttatcaaaatcttcacccgcttcacgtttcgcggtgaatgtgcgttgggcacgtgggtaacgagggtgatggtgacacaagctatcgactatctgcgacggaaacaccgtttcagccaactggtggtaaacgaagaacaacttcccgatgtgcaggacgaagcgagtattgccgaaagcggaagcgggctttcagaggaagtgttgatggcgtttgtagcggaacttcccgacggctgccgtaccgtgttcaacttgtacgtgttcgaggagaagtcgcacaaggagattgcggaactgcttcatatcaaggagcattcgtctacctcgcagttgcaccgtgccaagtgtatgttagcgaaaagaattaaagaatatactgaatatgagagaaaaagatgaaataaccggattgttccgcagccgtctgtccggcacagagatgacggtacgcgatggcttttgggagcagttgcaggaagacgcggcatctccggctgcaggccggaagagagcggctgttctttctcctaaatattatcgggtggcagctgccgcatccgttatatttgtgctgggagccgcttcggccgctttctggtatttctctccgaaagaggagataaaggaagcctttacgcaagtggctgctttgacgccggaaggcagtctggacggagatgtggtgcaggaatcttttccatctatccatcaggcaaccccgatggtgcggaattccggtacaaaaccacctgccgatggaattcccgcaggcatgactgcccaatcggaaactgagagcgagtctgtttccgtccggctttccatcactatcaggcagcgggtgcagcagaccggtgacggttacttcagcaatagtgccgttgcacaaaccggcagttcttatcagaacaccaccgggcgggtaagttctgcttcggacaccttttccgctgttcctgcggaagaagagcaggcaactactcctttaaaataccggaaatcgcgtaagtgggcgttgaaagcagctcttggaacctctcttcctaaaggggactacaatatgccgctgacggcggcagttacagtggaacgcagtctgaatagccggttcgcgttggaaacgggtattctgtataatcgtttgcatgccgaccgcacgctccatactttagggattcccgtaaaattgaatatgacattggcaagtactcccaaactcgatttatatgccactgtaggcggaactgccgaaaagtgcattgccggcgctgcggataacggctttaatgcggaacccgttcaactgtcggtagcggcaggagtaggggtgcgttacagattgaatgaccggtttgctttgtttgccgagccttcggtttcccaccatttcggtacggactccgaaaccggaaccttgcggacggaacgccctacgaacctgaatcttttgtgtggagtgcgcatgacttattaaccttaaagacaatacaacaaaatgaagactttctgtaaactatataaatacggatatctgatacttgcaatggcagcttgccttatgcttgcatcctgcggtaaagaatcgctggattacaatcatccggatgtagatttgtttgtaaaacaactgaaaaccggcaaatattctactcaaagtcctgaaggactgagtaatgttcccaagtttgccaaagaagatattgaagaactcctgaagtatgccgaggatttgacggtaataccttcttttccgttggctcccgtatcctattcggcaggcggaaaactgcggttaggcgaatgtatcctgtggacggtggaaacgattcgtttggggcataatgcttcgatggggtgtaagatggtgcataccgatgccgagaattatgaaggcatctacttcctgaccgatgaggaggtgctcgatgcagccgcccgttaccgccgttggtgggaaggccggaaatatccgcgtaccatgtggactatagacccttgctacgatgaaccgctttgcggaagcagctatatgtggtggtgagattaggtataaagtgtaaggtataaaaaacaatcggggtgaagtattctattctctttttggggttgctttgtgcggtaacctttcctctttacgctcaagagtggacgccgcaagactctttgcgtctgcaccggttgctggatggcgggggagagatgaagctgaatccggatgtattgaaggaaatgggcgttgatgctcctttgggctctccaaaggctgatgtaagtaagacgtggatggactttgatgcttccttacccgcaatgcctcggatgccggagaaaaaggtagtgcttaccttacggccttataccgcaaacaccaaatacaactgggatcccgtctatcagaagaagattacggtgaacaagaatacatggcggggcaatccgttctacgaactgaccaggcttaaaatctatacagactgggcaaagcgtccgttggatgccgggccgcgtgagagtatcgaacagatagaagctaccggtttgcgctatatggtgaccgaacgtgccaacaatatggcagtggggagttggcgaagtgtcggcggtggtggcattgcaggtgatttcatgcgtccttttacaaaagatttctggaacaggaaagctgccagacgccgtgcacgtactttggaagtattaaggacttacggcgattccataactgcccgccgtaaagagacgattatcaaatagggatattccgctttgagtattgaactttatttctccgcttcttgttttcataaaaataaacctttaaaggataaattaatgaatagaataacttctttgtttggaataaaataccccgtcattcagggcggtatggtatggtgcagtggctggcggttggcgtcggcagtaagtaatgccggtggtttggggctgttgggtgcaggctccatgcatcccgaaactttacgtgagcatatacggaagtgccgtgcggctacgcatcattcgtttggagtgaacattcctttaatgtatccccagatagaggaaatcatgcagattgtggtagatgagggggtgcgtatcgtgtttacttcggccggaaaccctacgacatggaccgcttggctgaagcagcatggcattacagtggtgcatgttgtttcgtcatcgcgttttgccatgaaagccgaggctgccggtgtagatgccatcgtggccgagggctttgaagccggcggacataacgggcgtgaagagacgactacgctttgcctgatacctgctgtacgtgcagttacctcactgcctttgattgctgccggcggcattgctaccggtgaggcgattcttgccatgcgtgctttgggggccgatggtgttcaggtgggtacgcggtttgctttgaccgaagaaagttcagccagcgaagtgtttaaagaatattgcctgcatctgaaagagggggatacccgtttattattgaagaaactatctccggtacgtctggcccgcggtaattttcagcaggcagtggcggctgccgaagctgcaggggctacggaagaggatttacgtatccttttgtcgagaggacgtgccaaacgcggcatttttgaaggagaccttgaagagggcgaacttgaaataggtcaggcttccgccttgctcaatgagaaaggaatacagacggtagcagaagtgatggacgaactggtaacaggttatcagcgggcatgcgaaacgcttgccgccaatgtttgcgagcgttgggacgtttgacagttgatataaacgattttgcctatagtgaaaaatccttttgacgtacattgtaccggatttccactataggcaaaattatatgagagcaagcctgcctttatcctttagggggaatgttcggagctttaccgctgttgttgctgttgtttgctgacggagcattgcccgtgggagacgcaacgctttcgtttgcagtggccgaagcggttgttccggcagttgccgtagtcgtggcggttttgcctgcaacttgtgcagccggttgttcttcccaatggaacggttcgaaagtgctgttcgggtcaacccagctcggcttcttggaagcgtagatgatgaacggagcaatcaccacgacaagtgcgccgatgataagtacggagaaccatacggtattgctgccagtagaaatctggctgggcgggatgaaactcagtacgaatgcaagcagtgagccgcagaagccgaggccgcctacaagccacatcagaccgttaccgcctttaccaatacggaacggacggttcagtttcttcatcttataacgcaatacgatggctccggagaacatcagcatatacatgatgagataaagcaccactgtcagttgtgaaagaatctggtagaaactctgtaccgaaggcatcaccacgaacagaaggcttaatacggttacagcgccaccttgtacgaacagaatgttcttttgtacacccagcttgtttgttttctggaagaacggaggcatataacctgccttgcccacggcaaagatacctttggacggaccggcaacccatgtcagcacacctgccagcacgccgaacgccagtgcaacggctataaccggcgacagccaggaagcatggatgtaacggaagtaattgtcgaaacctaccagcagactttgtgtaaggctgatgtccttggccggaataatgacacccagagcgaatgtgcccaacacgaagataagcaccgtaatcagtgcgccgataaacacagccttcggatagttcttggacggattgtttacatccttcacgtggataccgcccatctccatacctgcataaaagaggaagatacttgcggcaagcaccacattgtcaaagttcgtcaggtcggggaaaaagctgctgtggaagtccatattggaatgtccgcctgtggcaaggtagataatgccgaggacaatcagtaatccggcagggataattgtacctaccagaccgccgactttggctacctttcctacccagctcatacctttcagggaaatgaaagttgccagccagtagataacgagcaccacgaccagagtatagtacttgttgtttgccagcgacatgtcgtgtacgtcgttcatgccgatgaaagcgatggacacagcaccgaacgtcagtaccgtaggataccagattgtactttcaatccactgcacccagatagcgaggaagccgagtttctttccgtaggcttcacccacccagcggaacacaccgccttgtttgtcttgaaacattgcagccagttccgcagccacgagtgacgtagggataagaaagacaatggctgcaaataaataatagaaggccgaactcattccgtacacggcctcggcgggcagtccacgcagggatactacagccgtcacattcatgattgccagggtaaacactcccagcttcactgtttgtttaatatttgccataagttaaggtttttggtgaaaaatatattcgaaatcagcgtttataacaacccttgggaatagttgttcccggcgggtagaggaaaatcccggctttaacaattaaggagcgctctttgccggttcctgttctatctttttgtaatagtcttgcttttccttgttgcgccgctctaccaggctcgttacgtatactgtgaaaatggggaacatcatcatgcccagcgctgccagcagcacggacagtacccgccctgtgacggtgaccgctattatattggagcctaccgtagtcacatccatgaacgcccaccacaaggcgtcgccatacccctttaccagagggttgctcccatgctccatgacgtagaatgcaaggcttgagaaatagacggtagccagcagcattgtcaggtaagatacgaacaagcccgatgcgcggttgtacgtcagccatcccaccacgatggccatggcatagccgccccgtaccaatgggatgaaacgcagcatataggtgacttcgggtgagaaagtccagcccatataggcaatgatattctgataaggaatagctaccagcagaaagatgaaatgagtggctacataacgcatcttgtctgttgccaggaaccattctagtacaaagtccgccaggaacaatgcgcaaatccatagctgtacttccatgtacaccgattgctcgtagaaggggatgcctttgaacgtatcaatggagatgctgataaccaggaacagcgaaagcagcaggatgatgacatgcaatatgccgtatatccctttctttcgcaaaacgaattccgatagagccattttcataatgaagatctgtttggttacggaattgccgttggcaacccgtaattcatcattaaagaggttgcccctcagcgtccgtaacgctttcggagcaaccttggaaaaaagagtacgagagattattctgtaattgtcacattgtcgccgttgaatacgcccaggccgagcttgttcatgatgaacttgacggccagttgcgccttgacggagttaccggcttcgtccaacggtggagcgaaagcggaaacgcccatcacaccgggcaatacggccattacgccaccgcctacgccgctcttggcaggtatgccggcagtgtacatccagtcgcccgaatgctcgtagaagcccacagtagaaatcattgaagtgattttcggtgcgagccccgcatcgaatacgctttgtctggtaacgggattgacgccgttgttggcaatcgttccggctgcaatgcccaattgttcggctgtgatgcccagcgagcattggcgggtataaaggtcgagcgccacatccggatcgtcgtagatacggttgtaattcttcaataaccaggcaatggagcggttgttgaagttcgtagccgtttccgatttgtacagttcgtcgatgagttgcggagcggagccgcacagttctgtgatattctgtacaatggcatcccacttcttgtccggattgcccaccggctgtaccatggagcaagcggagatagcgcctgcatttaccaacggtgtagagggatggtcgttctctagcaaaatggcaatgatagagttgaacggcagtcctgttgcatcggcgccaatcatatccagcactttctgtgcaccgtattggcgcaggataagtatggcggtatgcacttttgaaacggattctatgccgaagcggtagtccgtatctccgatattgatggtttgtccgttcatcaggcagatgctgaggccgaacagtttggagtctatgttggcaaggtacggaatataatccgcattcttgccgccggtttgttctttcacctcattgtaggcttccagggcaacttccttgatttgagagattgatattttcttttccataatctatatatagagagagtttatatggaataaggaataggagactggagtttcaatctcctaaagccttatccgatacatggtttaatgtatgaaagcaataaagcggtaagctgattcttgctttattattttttgtggtgtcttccgccgtgattgaagattttgctttctaccggcagattcttatcctgtgccatgcgggtgggagtggggtaatccagtttctccagttcgacaatggcgtttttgatgtcgcccagcagcatatctgccatgtcgcggctgaatccctggcggacaacgacacgcattactacgtaatcttccagtttggaaggcagtgtataggcaggaaccatccagccttgttgcgagagtttatcctgcaagtcatacagggtccatttggcggtctttgcatactccggtttcaagtaccagatgaacaacgggttcactacttcatcggaataattcacgaacggagccatttttccgatttcgtcgtggatatacttggcgattgtgagcgaattgtactgtacttctttgtacccctggaatcctaagcggataaactggtaatactgtcctaaaatctgtgcggcaggacgggagaagttcaaaccgacttgcgtgatattggcgccgagataatttacgctgaatgacatctcttcgggcagatactctttgcctttccagcaaacccagcccagacccggatagaccaagccgaacttgtgaccgctgacactgatggaaagcacccatttcaaacggaagtcccactttttctccggatacaggaacgggaggatgaaaccgccgctggcagcgtctacgtggatgggaatgtcgtagccggtcttggcattgtatgcgtcgagcgctttgtcgagcgcttcaacatcgtcattcagtcctgtccatgtaaccccctggataggtacgatacagatggtgttctcgtcacacattttcagggcttcttcggggtcgagcgtggttttgtcaagagtcaggggcacttcgcgcatttcaatctgccacagttgggcaaacttttcccataccacctggaaaccggtggagataacgaagttcggcttatcgaacggtttgccttgcgcctgacgtttcttgcgccagcgcagccatgcagctacaccgcccagcatacacgcttcggaagaaccgatggcgagcgcgcctgttttccaggtatctttttccggagagttccacaagttggcgacgatgttgatacatttaccgttcattacggcgatgcggggatactcggtttcgtcgatgtagttgatgttgatggcttcgttcatcagcttggttgcgtattcgtccatataggtggtgacgaatgtagccaggttcagacggggctgtgtttgggcgaaggtctcatccttcaccatctggtaagcgatttcgggagtagtaggtccgtctggtattttttctaccggtgagggttgcaacatacggtttgagccgaatacatctgtcttggcatctccttttctgaaattcaaatcttccatataactgtaagtttttaaaggtttaggcggcggggactttccccgtcgaattttccacaacaacgacccccgcgaaagaaagttccgccgttttacattatttggcgtttattaaaagggcggggcggaaatcctggcgctctaccggctgttgctttttaattatcgcttattctatccgaacattctgttgcatcgcttgttgtccttccactaactaatccgctttttaaattatgaagattaataccggacaaggaaccattcctcttattacgcttataggtatctggtctgtttctgcactgacctcattgccgggcttggctgtttcgcctattttgggagaactttctacgatttttccccatgccacggagttggatatacagatgttgacttctttgccttccttgctgattatcccttttgtactattggcaggtaaattggcggagaaacgcgattttatccgtttgctgcgggtggggctttggctgtttgcagcgagcggtctactttatttgttttcttccaggatgtggcagctaatggctgtcagcgctttgctcggtatcggggcaggattgattattccgctttctacaggattgatttcacggtattttacgggagagtatcgcgtcaggcagtttggctatagctctgccataaccaatatgacgctggtggtggctacggctgtaacggggtatctggcagaggtgcactggcgtttgccttttgccgtttatctgttgccgttgatttctttagttctttcggcttatttaaagaaggatgcggcttcggtaacaatcaagcaggcggcggctatcattcctcccattcaatctacgcctgtaatttccggtaaatatggcatacacatatgccatcttgttcagttaatgttattctatgggttggttacttatgtagttcttgcggttacttttaacttgcctttcttgatggaagcgcatcacttttcaagcggtaattccgggctgatgatttctctgtttttccttgccattatggctcccggatttatgttggatagtttggtgaagcttttggggaataaaacaaaactttacagccttttggctattgccatcggattactgttgatatggatttcgcctacggaatggctcatcgtgccgggatgtattttagtaggtttgggctatggcatcatccagcctctgatttacgataagacagttgatactgctatccctcagaagacaacgcttgcccttgcctttgtaatggtgatgaattatcttgccatactgctttctcctttcatcacagactttttccaatggatattccataccggctcgcaagaatttccgtttatcttcaatctgtgcataacaatattgattatgcattgggcgtatgcaaagaaagaagaattcctgtttagtgattagtgattagcgatgagtgataagttataagttatgctgaatcataattcatcactaccccctaatcactaatcgctaatcacttatcactaactcctaaccacttatagttctatctcctcatacctcattccgaagacatctgccactgccttatacgtcactttcccttctaccacattcagtcccaatgccaatgccggatcatctttacaagcctgtttccaacctttgcaagctaatgccacggtataaggcagcgttgcatttgtcaatgccatagtggaagtaaacggtacggcaccgggaatattggccaccgcatagtgcacaatgccatccacgacatacgttggttcgctgtgggtagtgggatgggacgtttcaaaacaaccgccctggtcgatggcgacatccacaagtacggttccgggcttcatcattttcagcatctccctcgtaatcagatgcggtgctttatcgccggggataagtaccgaacctatcaccaaatccacggtaggcagttccattttaatattgtgaagcgaggaatagagtgtttttacattcttgggcaatacttcgctgagataacgcagacgcgtcaggttgacatccgtaatcatcacttccgcacccattcccgcagccatttgtgcggcattggtaccgactacgccacctcctaaaataagcacacgcgcagggcggacacccggtacgccacccattagcttgccctttccgccttgcggcttttccagaaagcgggctcccacctgggtagccatacgtcctgccacttcactcatgggagtaagcagtggcaaggaatggtcatccttctctacggtttcataggcgatacatacggcaccgctctcaatcatggcttcggtcagtaatttatcggcagcaaagtggaaataggtaaataccacttgtccctttttaatcagtttgtactcaggtgcaataggctccttcactttgacaatcatgtcggctatggcataaacgtcttcaatggcaggtaggatttgcgcacctacggcgatgtaatcatcgtcagagaacccgctgtttgcgccggccgttgcctgcacatacaccgtatgacctttcttcaccaactcggctactccggcaggggtcattcctacacggttctcgttgtttttgatttctttgggtactccgataatcataatgtcatctgttaatggttaaacatgttgcaagatagtgatttatctttctcattgtcattttgcacagcgtgttttacaacagaaaacgcctgcttttttctcgtgtgtgacggcaggattattcttttttggttaggcggagagaactattctttttatatttgcatgcattaaaaaataggatatgaactgtaagaatataaaatacccgatacttttctcttttttgttttttgcaggcagcatacaaggtggatatgcgcaagaagcgtccgatgtggaaaccggaccggacatagagcaggcatctttcacgccccctttcgattttccgattgtcttttccggtaacttcggcgagatacgctccaatcactttcacggcgggttggacttcaagaccggcggagccataggcaagcctgtacatgctttggcagacgggcatatctcgcgcatccgtgtgacgcacggttcgggatatgtgctcgatgtggactatgataacggttattccactatcaaccgccacctcagcgcatttgtgggcgatatagcccgaagggtgaaagacttgcaatatgaacaggaaagctgggaagtggagattacccccgaaccgggggaatatccggtaaaggcggggcaggtgatagcccttagcggcaacacgggttactctttcggccctcacctgcatctggatatgattgagtcggcaacaggagattatgtcgacccgctgcctttttttatggagaaggtgaaggacaatatcgctccccgtgccgaaggcatcattttgtttccccaaccgggcaaaggcgtggtgaacggaaagcagatacaccggactttccctgtaaatcctacccagcctattactgcctggggactgataggtgcaggaatccgtgcctatgaccatatggacggagtgggtaaccgctacggcgtgcataccgttattctcgaagtggacggtgaagaggtgttccgcagtgtggtagaccgctttgcttacgaagaaaaccgctatatcaattcatggacgcacggacagtacatgaagtcgttcatcgaacccggcaaccgtctgcgcatgctgcatgcttccaacggcaatcggggactggtggaaatcaacgaagagcgtccttaccgatttgtatatacgctaagcgatgcgttaggcaacacctcgaaagtccgtttcaccgtacaaggaaagaacaccgaaattcaccctgtggaacatcgcgagaagtatgctttcaagtgggacaggaccaactatctgcaggaacccggtctggaattggttgtaccgcgtggaatgttgtacgatgacgtttggctggactattccgtacgtgccgatagcggggatgtggcttttacttatcagttgcacaataagcgtgtccctctgcacggagcgtgcgagatgcgcatcggcttgcggcgcgaccgtttggaagataaatcgaagtattacgtagccggcgttacggcgcggggcggaaaatacagtataggcggcacttacgaggacggtttcatgaaagtccgtatccgcgacctgggcacttatacggtagcggtagataccgtgccgccggagataattccgctcaaccccggacagtgggggcgtacggggcgcatcaccctcaaggccaaggataaagaaaccggaataaacagttaccgcggaacgatagacgggaaatacgctctgttcggcaagcccaattccatcagcggcaatctggtctgcgaactcgacccgaagcatgtaaagaaaggtggcaggcacactgtggaaatgaccgtaaccgacggccgtggcaaccggactaccgaagagtttcattttgtatggtaacttttcacctgtgacattgcattatcaaacaaaccatataataacagaagtatgaaaaaattaactctctccgtcgcattagcggtggcaactgtggtaaacgcatttgcctgtaccaacctcattgtgggtaagaacgcctctgcagacggttctacaattgtttcctattctgccgactcctatggattgttcggcgagttataccattatcccgcaggcatgcacaaaaagggtacatggattgatgtgcacgagtgggacaccggcaagtacctcggccggatagaacaggcgcgccagacctacaacgtcatcggtaatatgaatgaattccagcttactatcggcgagacaaccttcggcggccgtcccgaactggtggatactaccggtatcatcgattacggaagtctgatttatctcggtctgcaacgttcccgtaccgcccgcgaagccatcaaggtaatgacggaactcgtacaggaatacggttattacagcagcggcgagtctttcacgattgccgaccccaacgaaatctggattatggagatgataggcaaggggcccggtgtgcgtggcgctgtgtgggtggctgtccgcgtgcccgatgattgcatctccgcacatgccaaccaaagccgtatccaccagttcgatatgagcgacaaggacaactgcatgtactctcccgatgtcatttcctttgcccgcgagaaaggttatttcgacggagtaaacaaggacttcagcttcgctaaggcctatgcgccgctcgattttggcgctcgccgttattgtgaagcccgcgtatggagctatttcaatatgtttaccgcccgaggcaacgagttcttaccttatatattaggcgataccgatacaccgatgccgcttttcgtgaagcccgaccgtaaaatctccgtacaggacgtaaagaatgccatgcgcgaccattacgaaggtactcctctcgacatcagcaaggatttcggcgccggaccgtatcacaccccttaccgcctttcacccctttccttcaaggtaggcgacaaggaatatttcaacgaacgccccatttccacccagcagagcggtttcgtgttcgtggcgcagatgcgttccaccttgcccgatgccataggcggcgtactgtggttcggtacggacgatgccaacatgaccgtgttcactcccgtatactgctgtacggataaggttcccgtatgttattcgcgtgcagacggtgcggactacatcacattctcctggaactcttctttctggattttcaactgggttgccaacatggtatatccccgttacgaccttatgatcggcgatgtgcgtgccacgcaggccgaactcgaaaacactttcaacgatgcgcaggaaggtatcgagtctgccgccgccaaacttttggagaaagaccctgccaaagcgaaagcattcctgacaaactataccaatatgacggcgcagagtactttcgacacctggaaacgtttgggcgagttcatcatcgtgaaatacaacgacggagttgtccgcaagatgaaagacggaaagtttgagcgcaatgccataggccagcctgccggcgtggaacgtccgggttatccgaaggaatttctggaagaatatgtaaaacaaacgggcgaccgctataaaatgcccaattgattaggatattcaaacttattcttttacatttgtgacagaacagaaaatgaagtattaacctttaatataaaaaaagtcttatggaaaatcaagagttgattaaacaggtgactgagaaagccgaaaagtggcttaccccggcatacgatgccgaaactcaggctgaagtgaaacgaatgttggaaaatccagataaaaccgaactgatagagtgcttttataaagacctggaattcggaacgggcggtttgcgcggcatcatgggtgcaggcagcaaccgcatgaatatctatacggtaggtgcggctacccagggattggcaaactatctgaacaaatgcttcaaggacaaagggcaaatctccgttgtggtgggtcacgactgccgtaacaacagccgcaagttcgccgaaatctctgccgatattttctcggcaaacggtatcaaggtttatctcttcgaggatttgcgtcctactccggaagtttccttcgctatccgccacctcggttgccaaagcggtatcaatctgactgcaagccacaacccgaaagaatacaacggctacaaggcttattgggatgacggtgcacaggtacttgctccgcacgacacagccattatcgatgaagtaaacaaggtaaccgttgaggatatcaagttcaaaggcaacaaagatttgattcagattatcggtgaagatgtagacaaggtatatctggacaaggttcataccctttctatcgatccggaagtaatcaagcgtcagaaagacctcagcatcgtttatactccgcttcacggcgcgggcagaacgctcattcccgcttctctgaaagaatggggctttgagaatgtacactgcgtgcccgaacagatggtgaagagcggtgacttcccgacagtggtttctccgaatcccgaaaacgcggaagcgctttccatggcaattgaacttgccaagaagatagacgccgacatcgtgatggcaagcgacccggatgccgaccgcgtaggtatggcttgcaaggacgacaagggcgaatgggtgctgattaacggtaaccagacctgcctgctcttcctgtactatattatcaagaaccgtatcgcaaccggcaagatgcagcctacggactttatcgtaaagaccattgtgactaccgaacttatcaaggccgttgccgataagaacaagattgagatgctcgactgctatacaggtttcaaatggattgcacgtgaaatccgtctgcgcgaaggcaagcagcaatacatcggcggcggtgaagaaagctacggcttccttgccgaagacttcgttcgcgataaagatgccgtttccgcttgttcattgttggcggaaatctgtgcatgggccaaagaccagggcaagacgctgtatgacatcctgatggacatctacgtagagtacggtttctccaaagaaactaccgtcaacgtagtgaagccgggtaagagtggcgccgatgaaatcaaggctatgatggataacttccgcgccaacccgccgaaagaaatcggtggctctgccgtttctttgactaaggactacaagacgctgaaggctaccgatgccaaaggcactgtaaccgctttggatatgcccgaaacatccaacgtgcttcagtactttacggaagacggtacgaagatttccgttcgtccctcgggtacggaacctaagattaagttctatatcgaggtgaaaggcgaaatgggatgtcctaagtgttatgccagcgcaaatgccgaggctgaaaagaaagtggaggcagtgcgcaaatcactcggtatctaagactgtttgattttcatatatggaaaggtgcaagtggcaggaagctgcttgcaccttttttcatacctaaaaagatattcccatatttgtttcccacacccattcccaacgtctgtggattatattgaattggtgtctgatacttgtttttacctgcattcgtctattgatgtcataagagaacccgcttccgaaatacagtgggtttactgttcccggcagtatggcggatttgctgctgctgcggctatagcctgcataaagatgatagccgagtttttgagttatgtcaaacttgaaatctgtcttttgctgtaaaagcattcctgctcttttgtcatattccttagcggctgagataccgaatcgttgagcgttcaagatatatttatcctgtaatggagtcttgtaatatatgtgtgcattgttcagccggaatcggggtatcgggtatgtctgtcggagatttttcggctggggcaaaagttcctcaataggtaaaatgggaatattgtgtatgtacgcaggtgtggaaaataataagtcaatttcttgcttgatagtaggattaatggatatatccgtttcttcgtccagtatctttttcagtttgatggagtcttgtttcgtccatatagtttgtccttgcataggaaaggagaaaccggcagataatactgccaacactatatatccttttttaatcatttctgttcgttgctggtgcttggttgtgagttagacgcaacatattacagaatgctgcaagaaacggctgtaaaaaaggttaagagagcgtctgtacaaaaacttgcttgctgcttgttctttaggcacggaattccgtgcctaagaggagtcatcatgtatcttttgaagtgcctcaattaagtttcttttatattctttataccggttggcaaatcaattcccattaaatgctgttcttatatgcaacagcagcctacagttaacagatagtactacagattgcggttgcacgccgattggttgatgtgaatgagagtcgtttcattcgtagttgttcgtttgcgagtgcgtgttttccgcaatctgttttttttgtcttttcctttaattattaatccgtcctttcaattattctccagccaccagtcaatcagttttcttgcaatgcttagtttccggggtatttccggcaggttgtctttggaatagaatgcgccggaactgagttcatcggcttgcagtttgatttccccgctttcatagtcggctatgaatcctaccattaatccgctgggataaggccagggctggctgccgaaataagtgatgtttttcacccttagccccgtttcttccataacttcccgctctacgcattgttccaacgtttcgcccgtttcgaggaagccggctaccaacccgtggaacgtgccgcggaagttgcgtgcatgtaccagcaatatttctttgcccttccgtatcagcacgatgatagccgtagaaacgggaggatacatctcattgccgcactccgggcatttcttcatgataggagtctgctgttccataggagtgccgcatacgggacagaaacggctgtggctgtcccaatagagtatctggaatgcttttcccgctgcctggtaatctgccaatggcaggtagtcgtaagaagcgcgcaagcctgtcattacccattcttcggtttcgggtacgggctgtccgagtgcgcaagcctttactttctttccgccggtcagagttacctcgtgtattttgcatcccgctgcgggtgttacaggaggggttactccataaggtataccgtatttgttctctccgtttgttgtgtactctttcttcagcagcagctggtctttgaaaaagacgaaccactgcatggattgttccatttccgtagtttccattcttctgttaatgctgaatattatttatataaactgtggagcggcttatgccccgacgccgcaggataccttgccggatgaatttgttcagttcatcgatggctgcatgccttgtcagcccggtcaggtgaatatattcgtttttggtgatgcaaacattctcctgcaggaacagcatcagcctttctttccttgtttcttctgtcgtttccgttttcttcgatttcttagtcggagaatgtgtcctttccagtttcattctctgtctgattttcttgcggaatgtgttgctgatacgcaaatgcacgttttgaaaacggacagattcggacctgattttctttttctcatcatcggtatcctgagtgcacttcaatgaagtgctgaaaaatcccaactctccgagttctacaatgttgccgctggcaagcaggtcgcacagttcgtcgatgcaagcgtccagtgccgcccctataatgtttttgggcagatgctgaaacatagcaacgtgttctacaaactctttttgggtataagtttctttaggacatatacgggcatggagagattttttttcctcgcttccgttaggagagggagtttcgtaaaggtcatagtatgcactcatgaataaattgttttgccactgcaatgaataatttccatccctgcaatgagttgttttttttcttactaagaagtaatcgtccgatagcagtttctctttcgtccgacaggtgtgtaattttcgtccgacatctgtcggacgaaagaaagacagatgtcggacggaaagtccttactatgcaaagatatagtttttaatgataggataacagttattgggagagtattattttattcttaacactctgattcctgtaaacttcttattccttttcagcatctgtgccaatggctcttgggagacgactaccattttctgcgtagaggaggcatggagcagtttcaatactcccttttcatagcaggcaagtcccagatggacaacatccagcccgggaatgttggtggtaatggctatgatatcgccatcctttatccacccgagtccttcatcgggcagtttgtttttggggatataatggaacagttgtccggagagcgacttttctatttcttcaatcttgctgatgttttcgggagaagactccaggtgtttgtatgctttggaatgcgcagacatgaagttgagggacagccttaccgtatcggggctgttggcagcggttatgtcttccatgaaaccatgtctgacgccgttgttcacccaatcggcaatgtagtgcaggcgggaagtgtaaccgtcgattttgccgtcgcgatagcggatgctttgcagggtgcgtgcgtagtcggcattgtctatcgtgccattcttgacgggagaaagtgccagggcgagcacatactccacaaaagtggtgcaatccacttcgtcgaagttgactacaagtttttcttcttcatttacttccagcgtatgtgccacgtagggagtcttgaggaaattcaaaccgtatttcagcatggcattgtccgtttcctgtgcggaaacggacgatgctattgccaaagtacagaaaacgcaaggcaaggtacggaatatacagtagaacctgttaaataaaatctgggatatgccggataacgttttcatagctggacagctttaatatctatatatcaaactcttgaaatccgttcccttgtcgaacggtacaatcgcgaaaccgtagctgatggcattctgcctgccgggacgtatcagataaggttcgtgcgccaaagctccccaactgtcgtcaccgcctacgcccatcatgcggtagtctatgaagaggtctacggagggttccggttgcgggtcggtgagatggcggtgattggtcttttcggtgcggggagagccgttctcgatagactcaccgctatccaggctttccagcggatagttggatacgttcatttcgaaagtgcggtcggcaacaaacagcagaccttcttttgctttactggtgagggtgcaccaatagatgtccgtgcggtggttgttttcttgcggacggacataaggctcgtacatatcttggatacccgatgtgtattcgccgatgaactgtgaggtgcggcggtcgcggtaattttcttccggaccacggccgtagtaggtcagcgaggtgatgcgggcgggtagctgcatacgcagtcccacacgcggtatcatcggtgtttgggcattctctgcaacgaaatggttgtctaccttgataacgccgttgccgtataccttatacgttatatcccagcgggcatcggtctgcgggaagcggtaggtcacttttaccgccgtagtatctttgtcgcgcactacgttgaagctttcggctttcggctcctgatagctggcctctttccatgctttcaaacgtacgggaagtttggctccgtagtcattgtcggtaggggcgcgccagaagaaggggcggggaccttgcccgttatggatgtactcttgcttcttgtatcggtaagataccagcaggccgctttgcttgtcgaaggttgccttgaagtgcggaccggagaaaacaacttgccggtcgtcttcttccgaaccggcgaatgcctgtttcggggcatcttccttatggaaagtatgcgcataggtctgttcacgggcaatgaccgtacccgccggaaggaacggttcgggagtacggatagcggcatagaactctatgcgtacgtctccggtcgagctgttggtggcgggaatgccgttgaggaacggactggtgacggtttgtcccggttcggccttgatgtctttgattcggcctttgtaaatctctttgccatgatggcggacgatgtaatggaagtcgtatttgtcgagattggtgaaggagaaatcattgcgtatctttacgacagaggctgccgggtcgaagtcgaagaacttgatgttctgatacacctttcccatttcctcggtctgcggcttgacgctacggtcgggatatactatgccgttgatacagaagtcgccgtcggacggggtgccgtactcgccgtagtcgccgccgtatgcccagtatttacggccgtcagcggtcttggcggcaagtccctggtctacccagtcccaaatacagccgccttgcaggatggggtatttctcgatgatgttccagtaatcctggaaattgccgaggctgttgcccatggcatgggcatattcgcagaggatgagcgggcgggtcatttcggggttctgtgcgtatttctcgatatgggcgggactgtggtacatggggcagaagatgtccgtgttccattccagcagggcgcgttcgtattgcacgggacggctgtccaatgctttcagcgtattgtaggtgacgtagaagttcaggccgtttcccgcttcgttgccaagcgaccaggtgatgatgcagggatggttcttgtcgcgctcgtacatgttcatggtgcggtctatatgcgcttttgtaaacagcgggttattacccagcgtgccgcctacgttcagattgtagcccattccgtggctctcgatattggcttcgtctatgacgtagaagccatattggtcgcacagctcatagaaacgttcctgctgcgggtaatggcaggtacggatcgtgtttatgttgtaccgcttccaaagttcgaaatctttcagcataagctcttcgggaacgtaatggccggtgtattcattatgctcgtgatagttgacgccttttacgaggataggtctgccgtttaccatcagttgcttgtcttttatctctacggtgcggaaccctactttgcaaccggtggcctcgataacgtcaccgttggtatgtttcagactgatgacaagcgtgtagaggttaggcgtctcggctgtccactgcaacggttctttgattgtctttggggtgaactccacttccgtctgaccgtaacttacacgggttgaggattgggcaatcagcttgtctttgctgtccagcaaacgatagcttacgaggaacggagtctctttgccggtttcgttggcaaacttcactttcagcttcaggattccgttgcggtaatctccgtccaggggagtctccgccttgaagtccgtcaggtgtatttgcggctgggcatacatgtagatgtcccgttcgatgccactgatgcgccagaagtcctggcactccagataattgccgtcggagaagcggtgcacctgtatggcaatcacgttctcgcctctgcgggcaagggaagtgacgttgaagcgtgcgggagtcttggagtctttgctcatgcctgcaaacttgccgttgaggtagtagaatgccgctccgcgcactccgtcggcgctcaggaagacttctttgttgtcccagtcggcaggcagggtgaaggtacggcggtaggttcccgtaggattccactctttgggaacgtagggcgggttgggcttgtcccaatagggggcatagccgggagagcagaactcgtacggctggttgacgtagataggcgtgccgaaaccttgcagctcccaattgccgggaacgttgatgtccggccatttgcttacgtccgtacgggcatccataaagtcggtaggacggtcggcgaagttctccacatagttgaatttccacttgccgttgagggagatgcggaatgttccgctcttgcggtcgttgacaacggcatccgcctcgttcgtgtaagaggtgaaggtgctgcggggcggctctttgttgatacttgtgagcttgggattggtaatttgcgcataccggtcttcctgcgccgcaagggcgacaggaagaaaggctgcggcaagcaatagtccgtgtattttcatggtaagtaagttttaaggattgaacaggttaatgatgattggcgtaaacggctgttacggaagcgttacttatccgggaaggtcagtccttctctcagccatttttccagctcgccggtccattggcgcttgtaggtgaagctgtcgcggaagccccatccgtgaccgccggtgggatagacgtgcagtgtggcaggcactttctgttcgcgcagggcgaggaagtaaccgatgccgttgataggcagtacggttgcgtcatctgccgacagcatgatgaaggcctgcggcgttttgggagatacctgcctttcgagcgagtatttctgttccagttcggccgaaggagtctctccgataaggttttggcgggaaccgctgtgggtcacgcctttcagcatggagatgacgggatagaacagtatctggaagtcgggacgggtagcgtcgctgccgtataacgtggcaagggaagctgccagatgtccgcctgcggatgctcccatgataccgatacggttggggttgacaccccattccccggcatgtttgcgtaccaggtggatggcttgctcggcatccgacaggggaacctcgttgtgcccgttcggcatgcggtacttcagtaccgcatacgtgatgccttgcgtcgtgaaccaggtcgccatgtcgtgcccttcgtggttcatggcaagacgggcgtatccgccgccggggcacataatgacggccataccgttgggctttgccggacggtaaacggttatggaaggatgggtcacgttggcaacgcggccgcctttcaaatcttcctgttcaccggtcagcccgtttgtattgggagctccgtcgggccacaacggcagttcgacgggactctgtgcggacaacatcgttgcggcaaacagaagggatagaaatagaatctttctcatggtgaatattgttttgtattatctgaatttgtttcagtgtccccgcagcttatttcgttttcatcgaagcctttacgaggtagaatatcaggatggcataagcacccagcgccagcacttcagaccatgtattgctgagccatgcgtcgttcaccatattgacaccgccgaagcgcattgccgcgcttaccacacccatcagcgcaccgccggcaatgaagccggacgccagcagcgtacctttctcgccacgttcggcattgagggttgcatccttgctgcggctggttacgtaccagtttacggcaccgcccactaccagcggaacgttcagctccaacgggatgaacatgcccagtgcaaaagccagtgcaggaatcttgcaggcatttagcacgatagccagcaccgcaccgatgccgtaaagcagccacggtgcacctacaccgttcatcagcggttcgataaccgccgccattgcgttggcctgcggagcagccagttgtctgctggtaaatccgtatgtcttgttcaggataatcatcacaccgcctacggtagctgccgaaacgattgttccgaggaacttccacgtctcctgtttcacgggagtgcttcccagccagtagccaatcttaaggtcggtgatgaaaccgcccgccatggacagtgccgtacaaaccacaccgcccataaccagcgctgccaccattccgccgggacctttcaggcctaccgccaccattactaccgatgcaaggataagcgtcatcagcgtcatgcccgataccgggttggttcccacaatggcaatggcattggctgctacggtggtgaagaggaacgagatgcccgcaacgagcaggatagccactaccgtgtgcatcaggttgccctgcatcacatcgaagtagaagaacagcgtaaccagtatcagcatcacgatagaaccgatagcgataatcttcatggaaaggtcgcgttgtgtacgcttcacgttggtttccgcatcagccttgccgcccatttccttggcagccagccctacggcactcttgatgatgccccatgacttgatgatgccgatgatacccgccattgcaatgccgccgataccgatgctcttggcatagtacttgaagatttcttcgggagacatggcacctacggtggcggtaatctccggattccattggttcagcacgctgtcgccccagataagggacatgccggggatgataatccaccatacggcaagcgagccggcgcagatgatagaggcgtatttcagtccgacgatatagcccagacccagtacggcagctccggtgtttaccttgaacaccagcttggctttttctgccagcatttcgccgaagccgcatacacgggtggtgaagttttcgttccaccaaccgaaagtggcaacgatgaagtcgtacagaccgccgataatacccgccgtcagcaacggttttgcctgactgccgcctttttctcccgatacaagcacctgcgtcgttgcggtggcctcggggaaaggatatttgccgtgcatgtcacttacaaaatatttacggaatgggataaggaaaaggatacccagtacgccgcccagcagcgaactgatgaatacttgtgcaaatgttacggtgatttcctgcggatagctttcctgtaggatatacagtgcgggcagggtaaagattgcgcctgccacaattactccggagctggctccgatggactggatgatgacgttttcgcccagagcgtttttacgcttggctgcaccggacacgccgacagcgataatggcgatggggatggcggcttcgaatacctgtcccactttcagccccagataggctgccgctgccgaaaacagtaccgccatggcgatgccccacagtaccgaccacaggtttacttcgggatatttcttgtcgggactcatcaggggattgtagacctctcccggcttcagttcgcggaacgcgttttccggtacgccgattgctttctcttcttcttgtttcataatagctgttttatttttattgttatgattgcgatatgtattccattatagacttcaaagaaagcaaaaaaaaaggagaattgaaaaattctccttttttctgtatcataaaaacgtttatttggcgtctttggcagtcatgtcgccttcaacgaacagacgcatcatttcggtcttggcgttggtgcgcagcgtaacggacttcttgaagtgtccggggtatttgcctgtaccgttgtaggtaatcttgatggttccggtctttccgggcatcaccggctcttgcgtgtattcgggcactgtgcatccgcaagatgccactgcctgatggattaccagcggagcgtctcccacgttggtgaatgtaaacgtgcagcttaccaccggattattttcggagaatgttccgaagttatgggtggtcttgtcgaatttaatgtctgccccgccttgtgcataggcataaccgatgctcataaccagcatcaacatataaaaagcaagtttcttcatgtctttatcttttttaattacacaaggtgcaaaggtaagccatttctgcaaaaatcactcgtactctgtgcgaaattgtattaaatcggcgtcagaagccattgtgacggatgataagcagagagaaataaggaaaacggagtgtttcaagctgctgcccgtcactgatgtatttctcctgcggagtgcctacattctcgaaatagcggtaatcgtattcgggatgaaggcggatgcaacggtgcacttcatcggtgcactgcgacagtttcatgatgactaccgtgttctgcgattgtatcagccgttctatctcttcggcggtggtgatgccgggaattacggtcagcctctcttcccggctggcgatgtgcaatccgccccgtgctccggcagcgatgaaagcggggatgccggcaatctgttctacggggatgccggcggcttgcagtttctcatatatataatgtacagaggagtagaagcctgcatcgccctctgccacgatagccactttcttgccggcgtgatgcagggaaagggcggcggcatacacttggtcgtaggcgttgagggcatcggtccgctgcttgctcatgggcagggagaagcggcggatacggttggcgggtatgtcgagccggagcatgatgtcggcggcgcgtgacagggaatgaccgtcgcggacgggtgtttcgggacagaagatacagtcggcattttgcagggctttcagtcctttcagggtgatgagttcggcttcaccggggccgagggatacgaattgaataggggacattctgttttttatgtgcaaaaatcgggaaataatcaatagtaagcaagatattcgctatctttgttacccttacaaataatggaagcctatggactaccaactgaatacgcgtttgaacggcaatatcgcaatgacatcccgctttcacgaaaacaagccgctgcaacgcgacaagactctgtataagtttctctgggtacagagcggcacgctcgccatcgaggtagaccatatacccatgaagctggcgaaagacgagattgtcacgcttaccccgctgcatcatctgactatcaaagaggtggcaggtgagtttctgacctttgttttcaacagtaacttctactgcatctacggacatgacaatgaggtgtcctgcaacggctttctgttctacggttcgtcccgggtgatgcggctgaagctgtccgaggagcaatcgtccaacctgcatgatatagtccgcatcttccgtcaggagtccgccattaatgacaatcttcaggaagagatgttgcggattgtactgaaacgtttcatcatcacctgtacgcgcatagcacgtgcaaggtttggtgtggggcaggagaatgaaaggactttcgatgttgtccgtcggttctatgtgctggtagaccagcatttccgtgaaaagaaacaggtgcaggactatgccgatatgctttgccgttcgcctaagacgctttccaacttgttttctgcctgcggactgccttctccgcttcgcatcattcacgaacggataggtgcggaagccagacgcctgctgctgtacacacggaagagcgctaaggaaatcagcgccattctgggctttgaggacttggctgcattcagccgcttcttcaagaaaatgacgggagagagtgtgtcggagtatcggaaacaagcacatcgggaagaattgccaactgttacggaataattgccattccacaaccggcaggaaacagggatctttgcaaaaacatttcacccgagtgtctctgcggtgaacctaaaacaacaaaaatatgaaaacgaaattgcaaaaactgttccttgcggcactgacgctggccgcttcttcccaaaagttgggtatcaacctcatccgcgtggccattcttgtgatatttgtatggataggcggcttgaaattctggaactacgaagccgaaggaatcgttccgttcgtggcaaacagtccttttatgagtttcttctacgataagcctgcaccggaatacaaggaatacaagctgaaagagggagagtttgacgaagccaagcaccggtggcatgtagagaacaatacctacggcttctcccgcggtcttggcatactgattatggcaatcggtatccttacttttctggggatattctttccgaaaatcggactggcaggggctgcgctggccgtcataatgactgtcggcacgctttcgttccttgtcactactcctgaagtgtgggttcccgatttgggaagcggagagcatggcttccctttgctgacaggggccggacgactggtgataaaggataccgccatccttgccggagctatcgtggtgctggcggacagtgcaaaaagagtattgaaccaattggaaaaataagactatgaaaaagtatgatgctattattatcggctttggaaaaggaggcaagacactcgctgccgggctggccgaacggaactttactgttgctatgatagaacgttcggataagatgtacggcggtacgtgtattaatatcggatgtattccgaccaagacactgatacattcggcaaagttggcagatacgagtgcgtcctgggaacagaaacgggcatactaccgccagtctgttgcacggaaagaggaagttacttctttcctgcgtcagaagaattaccgtaatctgtcagacaatcctaatataacggtatatacgggtacaggttcttttgtcggtcctgatgtggtggaagtacgtatggcggaagaaacgattcagcttcaagcccagcagatatttgtcaatacgggagctgaaaccatcattccgcctatcgggggagtaaaggacaatccgaaagtatacaccagcacttccattatggaactggcggagcttcctaagcatcttgttatcgtaggcggcgggtatatcggcttggagttcgcttcgatgtacgcttctttcggatcgcaggtgacagtgttggaaagttattccgaactgatagcccgtgaagaccgtgacattgctgccagcgtgcaggaagtgttggaaaagaaaggcatcactttctgcctgaatgcccgtgtgcagtccgtggaaggtacggtggttgtctatcaggatgccgtgacaggcaagattctgcaattggacgcggatgctattcttttggctaccggacgtcgtcccaatactgcgggattgaatctgcctgaggcaggagtagaggtgaacgaacgtggtgctattatcgtgaacgagcatttgcagactaccaatcccaatatccgtgctatcggtgatgtgaaaggcggactgcaatttacttatatttcgttggacgattaccgtattctccgcgaagacctgtttggagcgggagagcgtaaggtgtccgaccgtgagccggtgagctattcggtgtttatagatccgccgctttcacgtatcggtatgagtgagaccgaagcacgtgagaaaggtttgaacattaaggtaaacaaactccccgtctccgccattccccgtgcccgtacattgggcaatacggacgggttgttcaaggtgatagtggatgccgataccgataaaatagtgggttgcactctgtttggcccggagtcgagtgaagtaatcaatctggtggcgatggctatgaagatgaggcaggagtatactttcctgcgtgatttcatcttcacacatcctagcatgagcgaggcattgaacgatttgatgaacttgtagtttcttttataacgatttgttcgggaagagtttgcgtatctcctcaaaattgccgaatattgtgccctgaaatataaaaccgaacaatcatgatcagattacctctcatgggtcttgtatttgcgtgtgcagtgtctatgacttcgtgcggtacaaagtcccggcaagcatccggcaattccgatactgcggctgttgcggtttccgttgcggataccgcaacagccgttattcccgtctacgccaaaggctatgcggtgaaacatctgccggggaatgtgcgtctggtggacatacacgaccctcaaaaagaagaggggaatacctttcggtatgctttggttccgaggggtacgaagcctgccggtattcctgccgattataccgtgatagaaactccggtgaagcatgttatctgcatgacttccctgcaactctccaactttatccggttggatgcctgcgattatgtggtgggcattaccagtacccgccatcttttcaataaggagatgaacgggcgtctgaaggcgggcaagacatccaaaatcgggattgaggggaacttcgataacgaggtgattatgagcattaatcccgatgttatctttatctctcctttcaaacggggcggatatgacgccatgtgcgaaacaggcattccgctggtgccgcacttgggatataaggaaatgactccgttggggcaggctgaatggataaagttcatcggtatgttcatcggtcgggaagcagaggcgaatgcccgttttgccgggatagagaagcggtataacgagctgaaagaattggctgccggtgtaaaaaagcgtcctgtggtgttcagcggtgaaatgcgtggcggcaactggtatgcagtaggcggaaagagtttccttgccgaactgttccgggatgccggtgcagactatttcctgaaaggcgatccgcgttcgggcggtgtgacactggatttcgagacggtgtacagtagggcggagagtgccgactattggcgcattgtcaacagttacgacggaacattctcttacgatgccttgaagtctttggaccctcgttatgccgactttcgcgcttttcgcgagaaaggagtaatctattgcaatatgcgtgagaaacccttctatgagagtatgcccatgcagcctgaggtagtattggaagatttgattcatgcttttcatcccgacctgctgcccgattataaacccacttattacgagcgactgaactaatgaaaagacctgcattgccgttgatgctccttatactggcatccatcttcctgctctttttgctgaacctgctgttgggttccgtccatatcccgtttggcaagatatgggaattgctgtgggggacaggagcggcttccaatcccgatacgatgagcaaccaggaagttatctggagcaatatcctttggaaaagccgtgtgccgcaggccttgacggcattggtggcgggagcggggctttcggtcagcggtttgcagatgcagacggtgttccgtaatccgctggcaggaccttcggtgctgggcatcagttcgggagcgagcctgggagtggcttgtgtggtactgctgtccggtgctatgggcggtgtggcactgagccgtttggggtatatgggagaggtggcgttgtccgtggctgccattatcggggcattgtcggtcatggcgctgattgtctacgtctcccaaaaagtaaaggggaatgtaacgctgctcattatcggtgtgatgataggttatgtggcaagtgccgttatcggtgtattgaaatatttcagtgtggaagaggatatacgggcgtacgttatctgggggctgggcagttttgcacgtgtctccggcgatcagatgctgctgtttgtctgtatcatggcggtgttgctgcccttgtcgttcctgctgataaagaccatgaacctgttgttgttgggcgacggttatgcacgtaacttaggattgaatatcaaacgggcgcgcctgttcgtcatatcctgttccggagtgctggtggccattgtcaccgcctactgcggtcctattatgtttatcgggttggcagtgcctcatttatgccgcgccatttttcacacgtccgaccatcgcatattgatgcccgctaccctgctggtaggtgcagccttggcgttggtgtgtaacctgatagcccgcatgccgggattcgaaggagcgttgcccgttaattcggtgactgcgctggtaggtgcgccggtggttgcatccgtgcttttcagaaagagaaaaggggagttgaacgaataaaatatcaagtatattgaactctaatattacatataacattgaagaacgagactatacatatcgagaatctttctatcggctatcccggtaagagtgatgtgaaggtagtggcggacggcatctgtgcaggcatcaacagtggcgagctgacctgcctgctgggtgctaacggagtgggtaagtccacactgctccgcaccctgtccgctttccagcccaaactgggtggagagatacgtattcaaggcaaggagattgagtcctataccgacaagcaactgtcgcgcgttatcagcgtagtgctgacagagaaatgcgacatccgcaatatgtccgttacggaattgataggattgggacgcagtccctatacgggcttttggggtacgcttaccaaagaggacaggcaggtggtggagcgagccgttgctctggtaggtattcctcaccttgcgcatcggatggtacatacgttaagtgacggtgagcgccagaaagtcatgatagccaaagcgcttgcccaggaaactcccgtgatttatctggatgaacctacagcctttcttgattttcccagcaaagtggaaatgatgcaactgctgcaccacctcagccgccagacggacaagaccattttcctctctacacacgacctcgaactggctttgcagatagccgacaaaatctggcttatggacaaggcgaacggcgtcaccatcggtactcccgaggaccttgctctgaacggcagccttagcagctttttcgcccgtaaaggtatcgtgtttgatttggaaaccggattgttccgtgtagataatgaatataccatgcagatacgtttgtcagggcatgggcagagatacgccatggtgcgtaaggcattgcagcgtaacggcatccttgccaaccgcaacgtggagtcggaaacctacatcgaaacgggcgatttgaaaggcggcggcgcttttgtcctgcatcgtcccggtgaagaaccgatatgtctcaccagcatcgaggatttattggcgaagctccacgaaatctcattttgagtaagaaagtgtcgggcacgaaccctacgggcagtattcctttatcggaacttatatcctacggtgaagaatgaagcaaagtttcgtggcaggtaattatggaattcttccgtgtctattacctgccttagttgctggttgatctttaccaatcccacttgtgcctctgcaccgataatgagcctgcggtattcaaatgtgattcccacgatgataccgccgtccagccgcctgtttccggcattattctccaatacgttgccgaaagtatctatcttgaaaagccggttcccgctggaagaaccggcgtcgtgataatacgggatgctgccggatgtcttcccgcccacgccgcaggcaatgtacggaccggcattcagcgaggcatggtaatcttttcccaatggcaaccttgcagctattctgataggtatctgcaagtatagctcgttcatcttggcgttcttcacatagtccatatcatccttgccgcctatggatacaaactccaaagcagattgcaagacccaggtcttgttcagtgcgtatttcgcgcctatccccgctttgcaggctattcgcgtatcacagcaagagtgctttccgtagaggcgggaagttccgattcccgcctctgcataaaaggagagaggagattgtgcctgtgcggtcgatacggcaatcgccatgtacattatcatcaatgcctttttcatacatatatttttccgtcttcgctgattaataaaatcgtgagttctccatcgggcagcaggggagcgcagcattgtttgcaatgctctgtcagcagtttggagaatgtctccagtttttccgcagggataatatcccatagttcccgtgccagattcatattccggatagcggtcaatacatcttcgttgcatcctgtccggtgcgctatgtcctgaatgaactccttgttcatcgtcactttcttgctatgggtatcgaggtgaccttccgccagtttcacggctttgcctatcattactcccagcgtgacacggggtagtttcagcttatcggcaatcttcagcgtctcgccgatgaagttgccgtaatggacaaaggcctgtgccggcagttcgggataataagccttgatgtaccgttcgctctttgctccggagctgataactatacgcgggctgcctgtggcgcatgccacttccatcgactttcggatggagcttataaaagcttcgctggagaacggcttcacaatgcctgatgtgccgatgatggatattcccccttctatgcccagacgcggattgaaagtacgcttggctatttcctctccgccgggtacggagatggtcacaacaatgggatcgctcattttaggcatgccgacgtagtcgaggtacatccttacattgtcttctatcatcttgcgtggcgtggggttaatggcaggcgctcccaattccaatcctaatcccggcatggtgacgatgcctattccttctccgccggcaatgatgatattaaaatctttttgcgatgtttcatcgttgttttcatctatatcgatcggaagaatgatatccgcctttatccgcattccattggtaatgtcggggtcatctccggcgtcttttatgacgctggcttccgactccactatccaattgttgtttatggaactggaacggggatatctctgctgcggctctacaggaacatctatcaattctccgttgggtaggattactgcaaactccgggggacggggagttccctgaatgttgaatatatcccatatcgcagccgcagctgcggctgctgcgcatgttcccgtagtgagtccgctgcgcagggggtagaagccgggatagtattgctctaccgttctacgcaggccgtatttcccgtttacggacaaaaagttggggtgaagcggcgggcgctttattacaaagatgcgaatgcccagttcctgagctgcttttagtttttcggaaaatccgccggaagcaccgctctctttgaggatgacagcttcggggcgtatttgctgcatcaataggcgttcgtcttctccggtatggtagtaacgtaaatattcttcggggaatccctggtttctcgctgattcgcgcgaactttcacggtcgagaatacggaaatagcaacggctgctttccatccatagcgctttcagtttgcttatgctgtttactcccgtcagtgccagtattatatagacttcttcctttttaatttggcggatagcgtcttcataattgtcgcaccatacaatgccttcattattctctatacgggggtaaatgcgttcataacggatgaccggaatctgaagtatgtcagcagtttcactgacgttcctgtgcagctcttcggcaaaagggtgtgctgcgtctatcagcagcgagatgttctctttacggcagaaagactccagactatctttatccatgccaccttgcaggcggatgccgttatgcagaggaacttcttgttcattgcccttggttgaataatagaagggctttccagcttcctcaagtgtttggacggctatgcgtccttcggttgtaccgcctaatactaatatcattttttattttctgaataagtgtttgaattcgtgtgcatacagtcgcgacagtcctttgcgattgccgatagcctcgcctacgacaatcatggttgtcagggtcaggttattttcttttactatccgtgcaaggtctttcagctctccccggaagatgcgttcgtccggccaggtgaggtgatagcatacggctacgggggttgtttcgggatactcctgcagcagttccgcctgcacttgttctgcaatgcttgcgctaaggaagatgcacatggtgctttgcgagcgtgccatgagatgtagtttttcccgttcgggcatgggtgtccgtccttcgccgcgggtcagtatgatgctctgtactttctccgggatggtgaactgcgactttaaagccgccgctgctgcctggaaagaagatatgcccggagtgatatgataactcatgccgtatcggtcgaagtagttcatctgttcctgtatcgcaccatagatgcaggggtcacccgtatgcaggcgcacgatgaactttccttggtcgtagaactctttcatcagtgcaaactgttcttccaaatccatggaagcggagctgcggactgttgcgcccggtttggcgcaaagtgtcagttcgcggggcacgaggctgcctgcatagaggatgaggtctgccttttccagcatcgcccgtcctcgcacggagataaggtcagggtctccgggacctgcacctacaatctcgatgtgtccccggcgctgggcgcagatgtccagggtggcggctaccgtatagttctcgcctttgcgtttcggcattatcagttggctatttccggaggacagcaatgcggctgcctcgcttacactgggtgtacccatgtgcttcatcactgttttgctggggtggggcacgtccattgtcgccagttcctcggccgtatagaagaagacttcgtattccttttggagcgatttcactaccggttcgtcacgcttgacgttaatcgtagatatggttatgatggattgcggggagatgttgtactcttccagcttttctataatgcctttcacaacttttctcgtggggcttgcctgccgggcaagtccgatgccgacgtgcaccacgcgcggcacatagcagatggacggtatgtcctttatgttgtaatgtattcgcggagagacgatcagtaccagcttgaagcgggataatttgatgtctttcatctgatagaacacctctacatgagggggaaggttcgcttccatccagtcggttcctttgtcgcggatttccaacagcaatgcggtaggctgtccggttacaaaaagactgatagcctcgttcatgcacgccttcatctggtcgtcgggagtttgggtaagccctgccagcaggtgggtggaagggctcacacagatggtcggagaccagccgaagcgttggggcagtttgtccaatgcccacagtccggtaaggtcgctttgagtggttatcacgggttcggctcccaatgcaccggccactgcctcggtcagttcgttggctccgccgatatgtccggaaaggacggaaatggcatgtttacctatgctgtccacgcaaattacggcaggatctgtgtacttgtccttcacgcaaggggcgatggaacgtacgcagatgcctaaggctccgataaagataaacgcgtcgtaacgattgaaattcttgacagtgaaactgccggtcgattcgatgtgcgtacatccgctttcatagcggggagtgaaaatctccgcttcgggaaattctttgagcaacagccgggcggaagccattccggtttccgaaacgagcatgatggccgtctttatgtgggatgtttctgttttcatacaggttatttgtttctataatgaatatagcttatcttgctattttatgaaagtgttgctttcatgatttcaatagggttataatcattcagtgcgatgcgtactgacggatgcagtatcagaccggcggctccggctccttccatgaatgcttttttactgtctgccgatacggagttaaaaacgatacaaccgtcgggctgtaacgcttcctttatcttcatcagcatttccggcagatgtccgccgtgcccgcctatgaagacggcatcgggacgggggagagtatcggtcgccgtttgcaggaaatcgcctgtgattgccgtaatgcccggcgtaccgaagcggcggctgttgatattcatcagttcttcgccctcggcacgtacctcaaaggaaacgaccgtgaggtgagggaattgcagccgggcttcaatggaaaccgacccggtgcagaaaccgatatcccagaatacacggcggtggttcagttccagcgcttgtaacgtaagcaggcggataggtgctttggttatcatacgggtacgtccgtccaaatgtgcgaattgttcgtcggggataccaaaagggcgggcttcgggaaaagaggtggcgcaaagcaacagattgttgggatgctcgaatccgtcttgcgttgcttcctgtagtgtcatgtggcggatgcgttctttttcggggttgccaagatgctcgcctacatacatggtgtaacggtcgtatccgtattccagcatgcgggctgcgattgtagcgggcgtatgttcccggtcggtaaggatgcctatcttgggagcgcgttcaatcagggcgcggtcgaattcattccagggacgtcccgtcagcgaaacggttcgcatatcgtcataaggcattacgaggcggtgtgctaatgtttggagagaattgaaagaggggtatagcttgatttcagcatccggcaatttccgtttcaccgtattggcaaagccgaagaacagcgggtcgcccgaagcgaaaacgataatttgccgggggacggtatccgtttgtccgtatccgtcactgctgaacactttctcatattgtgagaatacgttgtccaatggtacggtaatggaaatccattccgcatcattcggcaacaagtttccgacaatctctttgtgtcgcactcctcccgaaaatactttcccgtgccgtatgtgttccaatacttccggcggaaagaaaggcgtccggttatcgtccgttcctataatgataaattttcgttgtataaccattcacttaccactaatcgttaattcttaatcgttgtttcacacgtctcgtcccggtcgtaactgttccgcatcattgtagcacaaaacggcgtttactaatgttgcagcaaggttgcttccgcctttgcgtccttctacaattattttcgggatggcggtgaaaggctttgtcatgtgcttggactcctgtacgtgtacgaagcccaccggagcggcgataatcccagccggatgcgctttccctttgcgtataagatcgcatagttccattaacgctgtcggagcgttgccgaatacaaaaagggcgtctggatggtcttcaacggcaaggcgtgtgcccgcttgtgtgcgggtgatgcctttctccgttgccattgctgcggtacggggatcgccgagatagcatttcacctttacgcccaaacgttccaaagctcctttacgaatgccgctggcagccattgtcacgtctgtaacgatggtccgtatgcgtttcccgatgataccttgatatagtgtttccactgctttttcgtctgtgtgcaacagcttttccatttcaaaatctgcggtggtgtggatggcgtgtagcaacgcccatttatggtcgaggggaatgtcccggttcctgagctctttctcgatggtacggaagctccgtatcatgatgtcctgccctttactagctccatactgggtattcccggtcgcaacctcctcccggtaatatccccgcggagtaatcatcgtaccgttccattcgtacgattgcgagttgcctatcagtactacggtaaacatatccgttttttcggggtcgaacgcttccaacgtcgttatgtgcacttcctgttcgggacgccctgcctggcgtacatagcctacgggggtctgtggtgaacgtccttcttgcaggaacaactctttcagccggtaaagttgccaatagcggccttcacttttgggattgtagacggctgtcacgaaatcggctgcggcagcggcaatgatacgtttctcaatgcgttcccacggggtcatcaggtctgagagggagataacgcagaagtcatgtcccacaggagctcccagcagggaagccgctttctggaatgcgctgataccgggcagggaaataatctctgcgttactgttccgttcccgcttcatttcatacacaagcggcgtcataccgtaaatccctgcatcgcccgaactgatgacgcacaccgtttttccctgctccgccagctcgaaagcttgctcggcgcggatacgttcgcgtttcattcctgtatctatacattccgtatcggggcgcaggtacggagtgacaaagcggaaatagtatttatagcccaccactgcatccgcttcctgtaaagcggcaacaacagcgggtgttatgtcttgcttattgcccggaccgatgccggcgatgattattttgggttgtttcatttgctatctgacttattgctgtctgttctgcagagcatggtaagtgttacgcctgcagttcacaaagatacattctatttatcacattatggcatgaaaaggtgactttctcactcgtttttttcccctgccgcatataccgctttcttttccatgatgccctgtgtgcggtgcttcagtccgaaacggatatggtctacgaatatcttttgtatttcagggatttgccctaaaccttccatgcgcacatgaacggtataaccttctttttcaagcatctcccgccattctccggcaatatcgtttttggcgtggtcgccggctacaaacataaaaggaacgagtgtcacactctttgctttggccgctttcagttgtgccaacatggtttcaaaggtgggatagccttcgatggtccctacatggaagttaccgaatccggctactttcagcatatagtccatctgactgtatgtagcagtgccgggcgtataagtgccatgccctaccaatacaaagtgttctttaccctttttctttgcactctgctgcaccgaagcattgaggcgttgtcctaaaatatcagttacttttttcgcatcttccaccgaatagagtagaggagtgcttacgcgtatctccttgaagaaaggcagcacgctttccacatcacggcggagcgactccatttccacaccgtcaatgatattggtactttgtacaataatgtgtgtgtagccctctccacgcagttggagtagcgcatccagcggggtatttttgacaacgccgcgtgtcttgaggcggcgtatgacgatgcgcgaagtataggcttcgcgaaactccaggtcgggaaaagccttgcgtgcttgggcattgatagcatcaatcgtctgcgtacgtgtatcatcgtgcgtcgtgccgaagtgtaccataagcaatgcggccttttcgccaggtttcatgcttgcaagcatatcgctcgacacgaagtttcccccttcgtgagcggagcagaagagagaaatggcaaggagcagggaaaggagagatgttttcataaataaaagtaattactgttttgtaaaaatgattgctgtttttttatttcttaaaccgtaccgacaaactcacgtataccgagcgtcccgggctgagcgtggagaagttattgttccaggggcggtcatctttcttgtcgaagatattctcgatacctacgcccggttccagaaccacggattgcagattgaaggtgtggcgggtattcaaatcccattgctggaatttgggagcgtaaccgtacgtttgcgagtagcgttcgccttgcaggtgtccgtgcacgtttacgttcaggcggtagaagctccaggcgtgttcccactggccgttgatgttccccatgtgcctgacgcttttgtctatgggcgacactttgtaactgccgtcggcttgcaactgcttggcttcggtgttcatatacgtgtatccgccgcctgccctgaagcctgcacccagattcaggctcgcattcagactgaggcctttggtcttggctttgtccacgttgtcgcgctggcgtatctcgtcgaaggtggcgtgcttgtcgtccagtcccatgtcgtgtatctcctgatcggagagggtgcggtagtttatcatgtcgcggatgtcgttgatgaacccggtgacggacacggagagccggcggtagttgtactccgcattcaacgagtagaagttgttcttttctggtttcaaaccgacgttgcccgtggtgtagcggttgctggtcttggactcgtcggtggcgtagagttgcgacagggtaggcgtacggaagcctgccgcataggcggcgcgcaggttcagtccgccgagcttgtacatcagcgatacgttgggagtggcataattcttgaagttctcgttgtagatgtagcgtatgcccagtacggcttgcaggttcaggggcagctttatttcatcctgtgcgtagaaagcgagggtgtacatgtggcgggagtcgatgttgtctgattcgctctcaagcccctcgtttacgtattccactccggcggacagtttgttgcggctgcccaggcggaagatacctttgatgtttccattatagtagcgcacttgcttgcgggtcacccggtcgcccggcagatagctgcccgacttcttgaagtacatatagttcgacgagtaattgtccgagtagaactctgcatcgatgtaagccgaacggtttatcatgtacttcatgccggcgccataagtataggtctcgtgtttcagattgtaggtataggcgtctttctgcacgaactggcctttgcttttggcatagtaggtggcgtcctgcggacggcgggttttgttatcataataagtaccgcgcgcgtagaacgacagtttgtctgtggcattgaacacgaaacgctggtttacggtgttggagtagaagcctacggaagtagggcgtcccgtttcgtagccgttctcgtcaatgttgttgttctgccagcttcctgcctgacggcgctggtaggaagtataagaggcgaacttgcccgcattgacatcggcattgacgctctccgtcagtcgtccctcaccggagtagtgagtatagctggatacgttcacggtgttccgggtatcgtccgtgatgatgttgataacaccgcctatggcatcgcttccgtatagggcggatgccgcgccgttcagtatctcgatgcgcttgatgttggccacgttgatgcgcgtgtagcggtcttcaccagccagacgtctgccgttttccaatatcagtatgtagtcctcgttgatgccgttcaggctcatggtagtgcccatgccgttggtgtaggaagagatattgggcgtcagcttcaccagcgcttcttccagcgtagatacgttggcgctgcctatttctttggctgtgattacggatacgggaacggggctgtctgtcatgcggcggtgcgtaccggttccggtcactaccacctggctgaggttgctgtaactctcctccagctttacaaggatgttttcttcttgtccgtccgcggtgtattttttgggggtgaagccgatgtaggagaagcgcagcgtgtgttgtccgtcgggcagattgtcgatgataaattctccttttccgttggtggcgcatcccgtcagactgttgtctacgcggatatttacccctgcaagaggctcattcgtgtcggcgctcaccacctttccactcaatgcggtttgggcatggagcaggggtgtcaggcagcacagtatggctgccaataaatagttggttttcatttattgaaaaatgtaagattaatacttgtcttcctgaccccgggaaggcgttgactgtgtaattgcccaggcaggtttcctgactcagccctacggaaaacgacaccttcccgtccccggtctgcgatggctcaaactgatgtttgctctcaccaacagccgtctgtaagacagtggtattgttttgaagaatgttttccgtatgctccgttgctgcaacaagcaggcggagcaaagtggctttacagtagcgggcactgttccggtttcgcaccggattcccttttatacaactcgttggaataacggagtgtatcacctaagcggtgacaaatatagatattatctctggaaaaatcaattaggaatgaataaatgatgatggcgtaactagtggccaatgacttatgaggatggattgtacctgtctgaaaaaaataaaattcttacactgttttgttgtgtaatagagtagtttctttttacgaagaatagtaggttatgattaaaatgagttaataaaaaccaattttggattctacggcagaatttttagtatatttattaacaattttcagttgtgatataaatgaccttgactatttttttcaatggcgctgatttatatgtggaagaattgttgaatgacaacggctgtactacctagtactgtggcattgtttgcattatttaatgctggcttaaaaccaacattaaagactataaagataacaggaacggatgccctttcattgtgatagatgcttacaatgaggaaagggtgttgaaatacaatgagagacaattaaaaaaaaaatagcaaaaattatgatatacatgaagcttattaaatatctgttttatatatttatgctattgggagtaacgggtgtatgggcacaaaagagcgacatacgcttgggaaaattactcaataatggcgattggtttacactggaagaggaatatcctatgattaaagatagcgtgcaaactcctatgctcagattaatgtctgaagccttattgggatattatttcaatcgcccggacgaaacgataacgtgtgtagactcgttgttgcaacattatcaagctgaactcggacttggaaatatagcctctatgttgcttgtaaaatctattgtagaggcaaataggggtaattatgccgtggctgccgatatattgaaggattttacatcgcagctaagggaacaaggtgtggcaatggattacactcaaatagatgaagcagtccagttttacgaccgcttccgtaattgcccaccaatgagcatagaactccctcaaaaaaatactgtgatagcaatgagtaacgacagcatcagactgaatataaaaaacgatacagtacagaggggaactagcatgtatgtgtcgataacagtgaacagtaaacagtataaagcaatatttgacacaggtgcaagtaccactttcatgtcggaagcatttgctaaaaagacaggtgtgagattgattgcagattctttacagatacatggtggtataacggtttacggacaatcgggtatcttggacagcatgcagataggtgatatcatagtaaggaatattcctataacgataaataaggacacaacactgaacaaggtagaagatattgactttcttattggggcagatgtaatggcattgctgggagagatacaaatatttcctcacaatgggaaaatagtaattcccacattgttgacggaaaaacctgcaagtggcagcaatatatacatggacaatcgctctcttatactaaaaggggaaagctgtggaaaatcatacaatttcttcttcgatacaggtaatggccttgccgctctatctcataatttttacgaaagtaataaaacagaaattgatgcaaaaagtaaacgtgttaggagacttacgggcggaattggtgttgtagaggaacgcgacatgttaattttgcccgaatggtcgtttcaatttggtggaagaaatgtagtgctcaagaatattgcagtggggcttgaaaataacagacttgtgccctacgcaggtaatattggaatggcacttatcaaccaatttgacaaggtgactatcaattttgataagtgttttgtgatttttgagtaagatgtacttatcttgtttggcttgtggaaaaatgttgtcttttagcgtttgggtaatttcttttatgtagccaaagaggagcaatattctttaaggctttgatttaatagtttgattcattagtgtcccgttaaaatgggacgagttaaacaattaatcaaaaagccccggaatcaggggatcatttagatctttgacatcattgaaattagtcttgtcgaacaggtcacgcaagtgggttttgtcagtcaatgatatgctgagaatttgtaaaacttcataggttgaacgtttcaacttcatatcatgttggacaatagccacaagacagtacgtgataatagccacactgatttgtatgcgaacagcgttctctgttgtgccccagaatttctttatcttgagatgctgcttgagccatttgaagaacagctcgattaaccatcttttcttataaagatcggcgacatccagtgcagaaagttgttttgcattcgtcaaaaaagtgaactcacggtcatcctcttcgtcgtaatatcggacgagtctgaatgactcaggatattttttctcggagagatatccggtcagtttcacttccgcatctgtcattatgttctttggcattcttcgcttccatctgactgtcttatactttaagttcgtcttggctctgacaacaaagaaagagtctgtaagatgtatcctatagagttctttaaaggagtcataagccctgtcgaatatataataagcatttggttcataatggattgaagacattgctgtggaatcatgctttgatgcagtagttacagtatagaaggcaggaacttgtgcttcaatgtcgtataagacatgagctttcacccctcctttcttgcttcggaactttgcccatgggaatgttgcaagacacaacggaatcgttgttgaatcaaacgcatatttctttccggaaatgtcaaggatgttggtcgtccgcttctcgcaggcttccttcatcatatagaatgcaaagtcttcgaagattctgtaatcacggttctggttcgctgtcgcaagagttgtcttggctatcggttcacgacctaaaccaagatgatattgcttggccctatgcgcctcgaaagcaacgactaagtctcgcaggctctcacggttactcagttgtccaaacatcatcgcgagcatctgattccagcaagtgaaatgtttcacatatctgttgccatcatacttgcgaacatagttgttgaactgagtcctgttcagaaaagcggttaattgagagaatacgtatttgtcttggaacatagcagccatttgtattagactgcaaagttgcaaaatcaagtccgtttcatttcaaaaaaccgtgtaattgactatatttcaataatttcaaagaactatttatccacttttacgggacagtagtgagtttgattattaatataatatgcgggtgctcctctgtagatgagaaatacccgcatattttttctgtctcagcctttcctctccttttttcccttattgaattaagaaaatggaggacaaatattatacttccggctgatatccttcaccgttttcccaggcatcggcatcccattgctctttcaggtgattcacccagattgcgcggatttcgggatagctgcccagagccttgataccgcagccgtctttgataccgtgatcggcatcagcttggcctacgggatgggcttcaaatgttctgtctaccttgaaacctgctttctccagacgttcgcgccaactgtactcgttggtattgagttccactttatccaagcctttgttctcggctatcgcttcgatgccccataggtcgttgtgggcatggtcaccggcgatggacatgaaaggagcgaggtatacgtttacttcattcggctccaggttattgtcctggcagtacttcatcacttgcgaatagatgcagccgggatagtcggctatcatttgggcggcaggtactaccgggatacggtctaccgctttctcttcctcttctttcggccagaaaagcatttctccatagtctacagtacctacgaagatattcttgtttgtggcaagagtatgcaaggcggtttggacttcggagtatttggtgttggcattgtagttcacatcagggttaccgtgccccatcaggagaacgatgttcttcttttcagccagtttgttcttgtagtggttgtaaaggacctgtgccacttcgtccgtatcatcatcggtagagagcaggttggcgcctttcagcacgtcgatgtgcggataccagtcaatcataaagtttttcttgatatcggtattcattagagaaaggtattcctcgccgggaatgacgtgaagcgactgtacggctacgtgtgtatatcctgcatcgccgatggctttcagccattggtccagtttgtagcgcgcttcgccggtagaagcctctgcacggccgatgcaggtacgtgaggtgaaagacatatagatgtctgtttgagggaactgcttccggaagtcggcgatgatttcgttgtaaacgtccaatgactcattataagtgcttccgaaagtacagagtaggatggcggtgtcatgcttcttggtttcggctactaccctggttgcagggtttacggtactttccgcatcgtcgtcatcgctacaggaggtgaatcctgtgcaagttgtggctgctacgagagccgccatcagataaaacttgaaatttttcatactttgtttgtaaattgattaataaaaaagatgtttttctctattttgccccgcccccgttcttgaactttataagcgccgatgcgtagaaattccttcccggcgtgctggtagcccggttacgtccgaaaggagtgcggtctacgtagttgaagaggttgtctacacctatgttcattgtcagcgtccagtgccgcatcttcattagggtatgggcggtgttgatgcgccatgtctggaagccgtcggcatcgttgtcgttaacgtagtggcgggtcgactggtatcggccgtacactcccaagccgaagcggtaacagtgccaagtgtactgccaggtggtgttgagcgtggcattatggttggatgtggcgtcgatatagaggtacttcatgtagttatcgcccgtatcggcggcatactgcgctttcggatcggcatagctgtacccaccgcccagcatgatgtctttcgtggggcggtagttgaaggtgaagtctatgccatagatgcgggctttcgtgaggttggtgtatttcttgcttttctctatttcgaggagcttttcttcgggggtgacttttatctctaccagctctatcatgttgcggatgaagttggcatatccggtcaggctcgcctggaacttgcttcctgcatactccacgctgatggaagtgtattgtgaggtttgcgccttgaggtctgtattgccatgataggcggtgagggagctgccgccgatgctgcctgtgtgttcataataaagctctttgatggtaggcgccttgaagcccatggcataggaagcgcgcaggttgaagttaccggctttgtagagtgcggatactttggggctgaggttcagtccggtttccttgtgttgcgtgccgcgtacgccggcagtcagtataaggttgcttgtggcagtccactcttcctgcgcataggcggcgagcgtatagacggaagcgatgtcgcctgctatgtggtgaggcgattccagacggttgtactggtactctatgccagtattgaggatgtgccggtcgccgaagtaaaagataccttttacctgcgccagcacttgttgctgtatgctctgcttgatacgctggccggggtagtaggtgatgcggtcgccgtctttgaagtagtcggtgatgtctttcagcttatagtcgtagaagtaaccgtagcgaccgtaagagaggtcggcggtgaggtagttgcgcccgttcagcttgtacctgcttccggcggcaaaagtatagttgcggtagtagaagtcgttgggcaggtacttccacgggccgtgcgtacgcatcacccaacgttcgtagtacgttccttcggcggtgaggttcagttttctgtttacctgccattccagattctcggaaagagtgtagttgctggaacggtttacggtaagcatggtggaaccgggcttcagttggttctgatcccattgcatatccgtattgcgccagccgtcggtgtgccggaagttgataccggtcaccgatttcagtttgccgtagttgaagccgaagctggcgctttgccgtacatcgccatgctcgcccacacgggtggtgctggtgagttccattttctctctgctccgtttggtaatgatattgatgactccggcaatggcatcgctgccgtaaagtgaagaagcggcgcctttcacgatttcgatgcgctctatgttggcgggattcagttggttgaggtcgttttgtccgccgatgtccccgttcatgcgcttgccgtttatcatgatgaggatatagtcgttgttcagcccgttgagctggatatggctgcccatgtcgccgtcatggaaggtgagggaagggctgagcccgctgagaaggtcgtctatgctgcgcgcctgatattgctccagcgcttttcccgtgagcacctctgtctgcacgggggcgtctttcaggtagtgctcggttcccgtacctgttaccactacttcgttgagcagtaacgagagttctttctcacctttgtttttaaggatactttgtgccggggcggattgcatcacaccgcacagcagtaccgcttcaagccaatacttgtgcttcatcgtctaccgattttttcgttgataaaacaaaacggcacttcgcttctgtgtgcgaaaggtaatggcccgaaagagtaaaataggaatcctatcgtatcagtataggggacatcgcttctaatcctggaagctcagtgctcaagttacggaagttggtaggtattctggctctcctctgcttgtattaccttcccatcgcgttgccgcgacagtggcttttgcggatacaaacatcttttattgaggattacagctgcaggtacagctccggttttgcaccggattcccttgcatcggcaggcggatatgccttcccgattgccaattccgggggtaaagataaagactttttatatattattcagctttttcttcctgattattttcttttttcttcattttgtctttctatcggtagtattcctctgcttttgcaagtgtttccggcttgccgatgtcgaaccaacggcggtcctgaagcggataaccctgtatgcaggctgtttcgcacacggatagataaaaaggaataatggagaacttcccttcccattgtctgctttccatatagcggaaaagggaaggggatatgacgtgaatgccaccgaaagccattttcttgtattgcctttcttggaaagagaatccttcgggcttggtttcaccggtggatttgtttatccagccgtgcaggcggttggcatcgtccagcagcaggtagcgtgatgtctgtcgttgactgacaagcagtgtagcctctgcattgctttcccaatgatgccggtaaagctctgcaagattgatgtcggaaaggatgtcggcattgtgcaccaggaacggttcgttgccgtccagaaacggacgcgctttctttatcccgccgcctgtgtcaagcagcatatcccgttcgtcactgaggtggatagtgatgccgaaatcgttattggcgcggagaaactcgataatctgttctccaaagtggtggatattgaccgtaatgtcattgaatccggcttctttcagccgtaaaatcacccgttccagcatcggctttccggctacggagacgagcgcttttggggtgtggtctgtcagcggacgaagacgggttcccagtccggcggcaaatatcattgctttcataaaataataggatgacgggcagtattactgtttcgcgctaaaattctgttctatgttctgttctctgtgtatcaggttcacttgtacgccgaacttcttgttgaggtgttcggcaaggtgttgggccgaatatacggagcggtgttggccgcctgtacagccgaaacatacggacaggttggtaaatccccgttccatataccgtttcacggatgcatctaccagcccatatacgtgttcgaggaatacggcgatttccccatcctcttcaaggaagcggacaacgggttcgtcgagaccggtgaaaggcttgtaacgttcatatttgccagggttgtttacggcacggcagtcgaatacgaaaccgccgccgttgccggaagaatcttcggggataccttttttataggcgaaactggtgacttttactaccagacgacgctttttcaggtcgtcggtgaattgtttcagttcggtcagcctgtgcaggactttacagagatacggatattcggggtaaggctcctgcaacagctggcgcaggttttcaatggcgaaaggcacgctttggatgaagtggggcttcttctcgaagtaaccgcggaaaccgtatgcgcccaatacctgcatggtgcggaacagtacgaaatgacggagctgggcatagaaatagctctcatccaccggctggtatttgcgcagggcttcgatgtattctttcagaagttcttggcgcaggctgtcgggataattggccttggcttgccacaggaatgaggccacgtcgtagtagacaggccctttacgtccgccctgaaagtcgataagccagggttcgccatccttaatcatcacgttgcggctttggaagtcgcgatacatgaaagtagcggaactgctgcggagaagcacgtctgccattttttggaaatcatcttccaggcggtcttcctgaaagtccatgcccgttgccttgaggaaacaatacttgaagtagttcaagtcccacagaatgctacggctgttgaactcagcctgcgggtaacagtaggagaagtccataccgtcggctccggcaaattgcacggcgggcagcaggcgcatggtcttacgaagcaattgcttctcctcttcatcgaatacgcttgtcttgcgtcctttttcgatggcgttgaacagaagcgtatctcctaaatcttcctgcaaatagtaaatattgtcttcggaacggataaacacttcgggcacgggcaatccttttccgcggaaatgctctgccatatagagaaaggcacggttttcctcaacggattcgccgcttacccctatcagcgtaggcgtacctttgaggcggaaatagcggcggtttgagccggaagagggaagttcgtcgatggcttcgggttcgtgcccggtatgtgtaatgtagagttttttaagttcttcgattatcatagcgttttttatatttggcagctaagataagacttttaccggatatattattacctttgtccgacaaaatccataacagcccttttatacttcataccttatacctaaataacatgcgtcacgtttctcagtttctcatagcagcccccacatcgggtagcggaaagaccaccgtaagccgcggactaatggctttgctgacacaaaaaggattggcggtacagccttttaaatgcggtccggattatatcgataccaaatatcatacggctgtatgcggacgtgcatccattaatctggatacgtttatggcttccggtgaacatgtgtgcgaactctatgcacatcatgccgtttctgcggatgtctgcattgtggaagggatgatgggaatgtttgacggatatgatcgcgaccggggctcttcggcggagatagctcagttgttgcaacttccagtcgtgctggtggtggatgccaagtctgccgcttattcaatggctcctttgctgtcgggattcatccattttcgtccggatatacggattgcgggggtgatattcaatcgtgtagggtcgtcccgccattatgaaatgctcagggaagtgtgtgccgaggtaggcataacctgtctggggtatcttccaaaggagaaaatgctggagcaggaatcacgttatttgggacttgatttcagtcgatccaaaggcacggatgccatcggtactctgacaaggttattggagcaatgcgtggattggaaactgctgctggcgaagacggcggttccgttgcgggaaacgcgggaaagggataaggagtttgtcggcggtaggaaaccgggcaacctgcgtatcttggtggcacgtaacgaggagtctttctctttcatttatgaagaacatctggagatgttgcgcggaatgggcaatgtctctttcttcgatccggaaaaggatgtccccatagcgcaggacaccgatttgttgtacttgccgggcgggtatccagaaaaacattctatggcgcttgccggagcccgtcaggtgaaagaatccgttcgggagtatatagagcgcggcggaaagacgctggcggagtgtggcggaatgatttacctttcgtatgccataggttatgacaaacgggagcatgagagcggtggcagcgggttcgacagaatggcgggtgtgtttcctttttatatctccaatgagagtgaatatcgaaaactgacattggggtatcgcagcttcgactataaggggcagcgtttgcgggggcacgagtttcattatacgcagttcggtaagtcggggacggctcccgatgacagtaagaaagagctgtatatgccgcctaccgtcgtgcaggtgtataatgccaaagggcaaccggtgaacacgcccgtattccgctacaagaatacgatagcaagttacacgcatctttattggggtgaaacggatataatgaggttatttgaataagcatacgctgaaagatgaaaaaagtatatacccgtacgggagataaaggaaccaccggcattcatggcggagcgcgtgttcccaaagatgatattcgcatcgaggcaaacggctgtctggacgaactgaatgccgtaataggaatcgtacgttccatgcttcctgccgaagacaattggcaggaactgctgcataccattcaaagagaactgatggtagtgatgagccatgtagctacgcccgatggcgtgttgaaccccaatcttctttctgccgccgaactgaccgtacgctgcgaacaggaaatggatgccatgactgccggactgaaggagaacggctattttcttctgccgggtggtacgcctgtttctgcgcaactacattttgcccgcacagtggcaaggcgtgccgagcgacgcttatggacactgcatcgccaagctccgctgaatgaggatattttgcgttttgtgaaccgtctgtcagatctcttctttgtcatggcgcgtacggagatgcagcggcaggattggccggaagagaaatggcaggaatttgcttataagaggaaaagactgtaagtttttcttaattttcgggtgctgatttgttaacaacagcgtattcctattaaaccatgttataagtaggaccacagtcctccgataatttggagattcccgaaatgtccgtatatttgcaatgtgtttttcatagtattagatttaaggttaacaagaagattggctgtctgggatagatagcctttttttatgcctctatgtcacctgtctttatgttacttcgtttatagactctccttgtagtgtacaccgcccacgcaccgtatatgattacttgtatccacagcgtcagcatctgaggccagatgtcggcaaggctgccgcccattgaatttaattttacgaaagcgagtactgcgggggccacagggaagacgtaatgcgccgcttgccagtaccagggcatcagttccagcgggtaagacacgccggaaaggaagatgtaacccacagaaaagaaggctatcatcagcagtggggcttcggagtcggtaaaccagcgggacacggcaagcgcaaagaaactcgtggcaagcaggaaaggaatcatcatagtgacaatgtcccaaccgcttcctatattgggaatgctgaaaatatgcggcagcagtcccaacaggaacatggagaacacaacatacagcattacatatacgaaggttcttcccgatacgatgcacagcatatctttcagggaacgggctttcatgctgtaaacgccttcccgctgctgttctgcttcttcgccggtaagcatggcaatcaccatcagcattgtctggaagatgatgacaatcattacggcgggaatcaggtaagaaccgtatccttcggtgtaattgtaaagggccgttcccgatacgctgacgggagtggacgacgcaacggccaacagaccttgcggcggcaggaatactgttccggtacgccggtgggtatcgtttacggcaagcatcacgcgcgagcttgcttcttgcaatcccttgaagttgaggaatgcgtccgtggcggcatacagggtgaatacggaagtctcgccgcgcgctacatgcgtctcgaagtcggaaggaatgtagagtataccggtaacctcgccttttttcatccacttgcgggcttcgaggatattgggcgtttgggcatagaccgaagtctgcggggcggcatccagccatcgtacgtactcccggctgagtgcggagtgggagaggtctactacggcaaccggtgctttgcgtaccagattgggagcatacatatagttgtagagtaagccataaaggaagattccccctgccagcaccagcaggatggcgggattggtggcaatggctttccattcgtggcggatgacattgctcagggatgcttccgtgccgggcgatgtaccggatgatataccggactgtatatcggtcgctgcaatgccggacaatgctttgtctccgatatggagagtttcttcgctttccttcctcctcagtatccaccacttcaataaaggcagaatcagtatggccagcagcaggaataccagtagtacagccaccgattgccagaaataagcaaaccccgcaccgaaataaatcatagcctgtgccgcttcggtgaagtgccgtaccggaaacaggtaggacgccgcatgcaccggtgcatacattgccgttaccggaaatgtcactcccgacagtgtagctcccaaagagcctaccattgacaccacgctgatgatataggctatcttgggaaagatagagaatatcagcaccgccaatgcctgcgtagccatgataaacagtaccgttacgatgttcatcagccacaagctgccttgaaacggtatgttcatcagtccgaacaacacgtagtttgccagtatgcctataacggagaacataacggtgtagggcaacagctttcctgcgacggcagtcagcatatcggcattccgcagattagccgggtcttttcctgcgggtgtggcagctcccatccattcttgcgttgtcccgaacttgaattcgctgcctatggcatacaccgttacaagtagaatcagtatctggaatagaacgaagaaaaacggctggctcagatagatagagtaatccatatccggattataaagcggatgcgtattggcttctaccggaagaaggaacgtctgtatctgttcctgccccacacccaatgcttcagcctgtacaacgatgggcgacagtgttacgggggcgagtgtggtttcaaatgctgccatcagttcgcttcctaccgaaagaagggcgtaatggtaatagtaagtcagcgttgcacccgtcccgctgactgttttctgctcaaactgcggcgggatggacaagtagccgtatatctccttccgttgcaatgcctgtcgtgcagaggcttcgtccgtaaggtgctccgtaacccggaaagtaggtgtggcggcaatgcgccgtgctatggtacgtgaggctgccgtattatcttggtctacaatgccgataggaatattctccatctgtccgtttccgaaaatggtagccataaagaacaggcagaacaagggcaggaggatgcacacgccgaaatagagacggcgtgaggtgatacggtgacattcgcggaagagtacattatataataagttcataataagaaatttgtatggtgagatgattggcgcttcaactctgaacggtatcgacttgggtgatgacagacttttttcaaatagggtgatgacggattttttagacataagaacaaataagaaaacattagcatatgttataatcatgaatatgttcttttgttcttatgtctgaaaaagattgtccggtttcccttctttcctttttatactttatttacgattgccgacattcccggtctaagcccttctaccgcttgtacaggtcgtgcatgtatctcgaacgtctgcatatcgtaactgcctgtctgcttggtcgatttccaagtggcgaaacttcccagcggactgatgtaatagatgcggaactctatgtctttcttgccgagggcaggaatgtccgctttgaaagtgccgcccattttgaactgtggcatcaggtcttcccggatgttcaggactacgtgtgcatcgctcatcaccaccaggctcatgataggcgtgcccggagccaccagctcgccgcgcttgggaaagatagtggctatctgtccgtcttcgggagcagtgagcctggagtctacaagaagggcggaaacttcatccaccgtgctgcgtgcggcatctacaaggctacgtgcggcagcgcggtcttcgctttgcgctccgtccacagccatttgatattgctggtatgccgcgcgttcggcagcttgtgcggctttgtacatggcttctacttcgtcctttcgttgcgaagtaaccacactgtctttataaagggtgaggatgcgctgataggtggtttgggcaagcgtcaggtcgctttgcgtcttattccaaagctgcaaggctgtagcgataatctgcctgcgcgttccggcatcaatctttttgttctgttcctgcgccacctgttccaaagcatttacctgacggtatttggcttcgatagtgggactgttgatgacaacgagcgtgtcacccgcttttacccaatccccctcttgtacgaggaaagaatctacacgccccggcagttttccgctgatgcgtatctccgtggcttctacctgcccttgcagcaccattggctgccggctcataagtgacattccgataaccgatactcctatggtaacgattaatacgacgatgaatgcgatgctgatggttttgttgctgatattcatttaatttaagtataaactataaagtacggtgtatccaaatacacttgatgtttctttttaggtacggattatacggaataaggaaaatctgtgttttccgtgtaatcctcattgcacagcctgtttctcaatttttaattctcaactctcaatttactaagtttcccgaattcttccggcgtgccgcaaagcgccagcagattcatcaacgccacgtcatactcgtaataggctgccagtcgggccacgcgtatggttgccagcatcgtttctgaatctattacttcggtgcttgttgccatgccttcagtgaacgatttcttgcggatgcgcactaactcttcgctcagttcgatagttgtgttcagggcacgaacgttatcctgtgctttctgcatctgcgtgtagagtttgtcgatacccacacttaaatcgtctttggctttttcctgccctatggagagggtctgttgggctatcttggattggcgtatccgtttctcccgtgccagaccgtcaaagagattccaggtgaatcctacccctatcatggtgcgggggacgaggttgctttggatgccgtgggcatatagcgtctgcttgccgaatacggcgatgtccggcaggtagccgctctgttcgatacggagctgttgtttggctatatgcgattgcaactgcaattggttaacggtatagttctcggtttgcatggtttgcaggaactcctcttttgcaggtagcatggcgtttatgaaaagcggggaaacgggttgtatgctgcaagtatccgttatgttgagcaacgtacgcaaagcgttttgcagaacggctgtttccttttgcgaggcttccagcgagcgttgcgcttcgtccatgttcacttgcgcaaagaggcgtccggccttgtctatcattccggcggcttccagtttcaaggcattttcgtaatgacgtttcaggctgttgtaggtgtcttggcgtacacgcaccacttcttgtgccaggcgcagtccgaaataactttccgccaagaggacacgctgcgtggcgtctgtctgttcgcggttctcgcgggcgatgtcaatcattgcatttcctatctttccggcacggatgcgctttccgccggaaaacacgatccattcggcggtcagacctaccgtggtgaggttacggggtgcgagcggaaaggcgagggtgtggctgcctatctggtcgaggatactgctgataaattggtcgtccggtacgaggttgtggacaaagtctttggcagggtcggtaaattgcgagagcggttgcttcacttctatcttttcggacaggtgtacgaatgtgcccgcaccttgcaggctcggataccaaagggcgttcagtttgtcacgttccgtccgtgcggtctcgatacccttgtcggctatcttcaggcttcggtttccctgctgcatctgccgaagggcatcatcgaagctcagggagaggatttgcgctgttgcggaaacacttgctcccaagaagatgatgagtaagatttgtttcatatattaagtttttcgtttaggttggaataatagtctttcaaacactctttgcgaaagattgttcgttcgtatattgcgtaaaaaactaataaagcagatttatgaatgaagtagaaacaaaagatgtgggcacaacggatttgtctgcctacatgatgaaagtgattgaagaactaaggcgtgacaggaagccgccggcagtacatatctatgcctgtacgctccgctccttcatccgcttctcctgcagcggggaggaggagtgctccatgccgatgcaggaagtcttcacacccggtcgcctgaaagagtacgaacagtggatgttgctccgtaaactgacgcagaacaccatatccacctacatgcgtactttgcgtgccgtttacaaccgttggatgccgcccggcacggcggagcacaatccgcgactcttcgacgatgtctataccggtgtggtgtcgcagaccaagcgtgcgctcactgcccgccagatggaacagttgctggaagccgacctttccggtctttctccacagcagcaggcgatacttgcttattttctgctgatgttcttgctccgcggcatgccttttatcgaccttgcccatttgcgcaagcgcgatatgcaggatggcaggataacctacagccgtcataagacggataagccgataacggtacgcattccccgtgaggctcttgtactgatagcgaagtacgccgacaggcattccgcctcgccctaccttttccccatactcgatgcgaggatacgggacagctggcagtcgtaccgcaattatcaggatgcccttcggcatttcaatcgcaagttggggcaggtgatgagccccttgctgcccggtgtacgggtcagctcatacacggcccggcacacatgggctacacttgctttccatagcgggcagccggtaggaattatcagtcaggctttgggacattcgtccctgcgggtgacggaaacctatctcaagcctttcggcaatgagctagtcgataaggcaaacaggcaactgatagcttccgttagaaaatgtaaatggaaaaatgaaacagaatatagggcaggattataagccggaattacttatcaagtaacggtgttgttaacgttgtaaatatatgctaaattttaccaaatgccaattaattgttagaaaaagtttaattaaatcttgtatttagtcctgaagcccgcaaatcccaccttatataatatatattgccccgttcgtattccgtataagatatacgaacccctttccccgcttcggatgtaaaagcggagccgaagcttcgatggttgaaagataggaattatagcggtggtaacggttggtttatgtgcaggttccataaactgcacagtcttctttccggtgtccgaccgttacttgataagtaatctacaatcaattcccatatttattaattaaaaaacaatcaacatgaagaagactaaattttatgcactgttgttctttctgacagtagtaatgtccggatgtgataacgagtacgatgacaccggtatccgcacacagattgccgaagtcacagaccaggtgaaagccttgcagaccttgaccgaagctttgcaaaaccgtgattacattctttcggtagtacccactaccgtggaaggagtacccggttacctcatcacttttgcccaggcagagccggtaaccattctttgcggaacttccgtaattgctgcggtggatacttcacatggtgattacgtggtctttacgcttgccgacggaacaacgaccattacactgccccgaagcaatgccgtcaccatcggactcgacggttacgatgtattatattgtaccgcttccagcttggatatcccattgctgtttccctctaccttgaaatctggtgattatacatccattgcagctaccgttaccaacgataacggtacggggacggatatacaaacccgtgcttctgccggtacgaacggtgtttggaaggtggacataacccaaccggcttttggtgatgacggaatgattattcccaacagctccaaagttacgcttactccgccaaaacatgtaaagctttccgataccgctattctgaaagtgacgttggtagataagaaaggtatggagacaaccgttacacgtcccattaagtattccactgttgctgctgtaacctctactgccggaaatctgagcagtgtagctaccgatgcagagatgactgcacttgccataaaaggcagtgtggatgctaccgaccttgcctatatccgcaatacccttaccaaactcgaggtgctcgacctctccatgacggatatggttacccttcccggttggggattgggctttcatccggatgacgggtatcagcctaatacaacattgaaagaagtgatgctttccgcaagccttgttaccatcggtaaatctgcattcctcaattgccgggcattggattatgtcgataccggcaatgctgaaacaatcaccgaatatgcctttgaaggatgtagtaacctgcgtgaggtcatcctgtccgaaaaactgaaaacggtaggtaattgtgcttttagaaattgtgtttccttgtcgttgattgatattccgggaagtgtggaaacactgggccgttgggtgttcgagaactgcggaaacctgcagagtgttgtcttgcatgaaggtgtacaatccttgtctgaaagcactttctacggatgtggcctccgttctgtcagcatcccctctaccgtgactgccatccccaattggacttttcaagactgcaagtatctggagcatgtgaactggcacgacggcattacctcaataggtgaggcggcttttaaccgttgcacttcgctccggaacataaggattcctgccggagtgacctccatagcagatgatacgttctatggttgcacttcacttcattccgtaggcttccacgataatataacccgtataggtgtcaatgcgtttgataaatgttacgttttgaccttggaagaaacaaatcaggataacccctataatctgcctgtcagcctgactacgcttggagaatgtgcttttcagaattgtaccggcattacacgtgtgtgtttgccggaaggtgttaccgtcgtaccgagatatgcctttaacggatgtaccaaattaaatggcgttgtactttccaaacagactgtaacgatagaagattgggcttttgcgggtacggcactgactggaatctccctcccggcaacggtcacctctttaggagacaatgtattccacaactgttcggaactgataggtgtgcagagctatccgacaaccgcaccgactattaccgccactactttcagccatgataagggcactatcaaagagcagtgccggttgtttgttcttcccactgcatcatcggcatacgatagctggaaaaattactttaaagcagtagttgctgacttgactgtacaataataatcgtcttccggtttgcctttcccggtcggcatcattcggagaaaaagtgctttttattaattccataaaacaaatcaaaattatggcagaaaatatcaaatatcagatcaatggccagttggccgacaataccgttacggtggataacaaggaagacatgattcttgtccccgtcagcatcggcagtgcaaacgaggcacgtatcatcgcggagatgaaagccgaggactcaggtctgcgcgaggagaccatcaagcacgtattcgaattggagaaacgtgttatcaaacgcctgctcatgagcggctacaacgtgaatacgggtctttactacgccagcgtcagctttcgcggtgtcatagagaactcgcaatggaatcccgcaaagaactctatcgtggtgaatttcaatgtaggagcggatttgcgccaggcaataaagaatactaccgtaggcatcattggcgagaagggggcagccatgttcgttacaggcgtacaggatgccgccacccgtgcacaggatgccagcgccaccgcaggacgagctttcaccctcacaggcggtaaactgaaaatagccggtacgggcccctcggtaggcattactctgaccgattcttccggtgcggaaacaaaaataacggaagacctctatgtcgtgaacgacccgtcccgactgacgttcatcatccccgcaggccttgccgacggcacgtatgaactgaaagtgacgacgcaattctccggttccggttccaaattgctgaaaaccccacatagcgccgccaaaaccatttatatcggcaaagcgcccgaaggcggaggcggttcgtccggcggtgaagaagaaaatcctctcggataaacaagagttggtatgcagccacgctgcatagtactgtgcagtatgactgcatagccttgtgcaggggagctgcatagaactgttcgggatggctgcataatgccatctgtcattactcccgattatggtgggaaacatatagaaagtgctgttcatagaatcttatggacggcactttttgtaactcaatgaaaatacataaggaaagatactttcgctttctatctctataaaaaggattttgtatctttgtcatccgaattaaaaccatgcagcgtacctgaactctgcaagtggttttatgcttttacaaaagaagatgattgacaaagaaataagtaatctgaaagctattgataccttgatccggcaggaacagccttttgccgtttatcgtattcccggtgaggacactccccgtttgctgacacaagcgtcgggaagcgtccgtctgttgtatgaccttaaagacttggacggggcacgcggtttcgtcattgcaccgttccgtgcaagcgagtcgtgtccgattgtgctgatacagccggagcagtggggacagcctttgccgcttggcgagtacgcggaagaggagctggaagctttccggttgcgtcaaggcagggaaacattttcagaagcttgcacggaagagtacgaagcatgcttccggacatttatagaagccttgcgcagcaagcagtttgacaaattggtcctttcccgtaaatccgtcatcgggcagtgcccgggtttctctccctcggcagtgtttcgtgcggcatgcaagcattatattcattcttatatatacttatgctatacgccccggacaggtgtctggatgggtagtacccctgagattatcttatccggggagaaaaacgagtggagcaccgtggcattggcgggaacccaacctttgcaggatggcagactgccgcaggaatggggcgagaagaaccggcaggagcaggactatgtggcgtcttatatccgtcgtcagctcctgtcatcgggcattcatcccacggagagcggtccgtatcccgcttatgccggagcactgtcgcacctgaaaacgagtttccgtttcaccttgaaagataacaaccgtttgggaagccttttggagcttctgcatccgacccctgccgtgtgcggtctgccgaaagaggaggcataccgttttatactggacaacgaagggtatgaccgtcgttattattctggtttcatcgggtggctcgaccctgacggcaagacggatttatacgtgaacctgcggtgcatgcacatcgaaaacgggcagttgtctttctatgccggcggcggactgctggcttcttcggaactgaatgacgaatggctggaaacggaaaagaagttgcagaccatgaaacggttggtaagcatgtccctataatccataaatcgctaatctttaatcactgaaccatgtatacagacaaaaagaatatactccaactggcagcgcttctcgaggcgtacggatttaccagggtcgtgttgtgcccgggcagccgcaatgcccccatcgtgcatactttgtccaatcacccgggctttgtttgccatgcaatgacggatgagcggagtgcggggtatttcgccctcggcctggctttgaatagcggcaagcctgttgcggtgtgctgtacttcgggaaccgccttgttgaatctccaccctgccgtggcggaggctttttatcagaaagttcccctgatagtcatctccgccgaccgcccggctgcttggatagggcagatggacggacagacgcttccgcagccggaggtgttccggtcgctggtcaagaaatccgtcaaccttcccgaaattcatgcggacgaggatgagtggttctgcaaccgactgataaatgaagccctgctggaaaccaaccatcacggaaaaggaccggtacatatcaatgtgcccgtttccgagcctttgttcaatttcacgacggaggcgctgccccaagtgcgtgtcatcacccgctatcaggggctgaatgtctacgaccgcgattataacgaactcatcgaccgcatgaacaaataccggaagcggatgattgtggtggggcagatgaaccttatctacctgtttgaaaagcggtataccaaactgctgtataaacattttgcatggctgacggagcatatcggcaaccggacggttccgggcattcccgtgaagaatttcgatgcggcgctctatgccatgcccgaagagaaaatggaccagatggctcccgaactgctgattacttacggggggcatatcgtatccaaacggttgaaaaagtaccttcgccggcatccgcccaaagagcactggcatgtgtcgccggatggcgaggtgaccgacctttacggctccttgaccaccgttatagaaatggacccgtttgagtttctggaaaagatagcggccctgcttgaaacccggactcccgaatatccccgcatctgggaagactactgcaaggctgttcccgaaccggagttcgcttattcggagatggcggcagtgggggcgttgataaagtccttgccggaagcatcggtactgcatctggcaaacagttcggtggtgcgttatgcccagttgtatgccgtttcgcccaccgtagaggtttgctgcaaccggggaaccagcggcatcgaaggttcgctttccacggctgtggggtatgcggcggcgtctgacaagctgaacttcgttgctatcggagatttgagcttcttttacgatatgaatgcgttgtggaatgccaatatcggtcccaacctgcgcatccttttactgaataacggcggcggagaaatctttcatacattgccgggactcgacatgtcggagtcttcgcataagtttatcacagcggttcacaagacttcggccaaaggctgggcggaagagcggggattcctttacctgcgtgcggagaacggcggacagttggctgaggctatgaggtccttcaccagttcggaggcggcggagcgccccatcttgctggaagtgtttaccgacaaggacgaagacacccgtatgttgaagaattattatcatcaattaaaatagaatacagattatgcagacaaaaagagaatggacaaccatccgggaatatgaagatattctttttgaatactataacggaattgcccgtatcaccatcaaccgcgaacgctaccgcaatgcgtttactccgaccactaccgccgaaatgagcgatgccttgcgcatctgccgtgaggaagcggatattgatgtgattgtcattaccggagcgggcgacaaggctttctgctccggaggcgaccagaatgtgaaaggacgcggcgggtatatcggtaaggacggcgttccccgtttgagcgtattggacgtgcagaagcaaatccgcagcatcccgaaacccgtgattgccgccgtaaacggttttgccatcggtggcggacacgtgctgcatgtggtgtgcgacttgtccatcgcttccgagaacgctatcttcggccagacaggtccccgtgtgggaagtttcgatgccggattcggcgcatcttacctggctcgtgtggtaggtcagaagaaagcgcgtgaaatctggttcctttgccggaaatacaatgcgcaggaagcgttggaaatgggattggtcaacaaggtagtgcctttggagcaactggaagacgagtatgtgcaatgggcggaagagatgatgcagctcagtccgctggctttgcgcatgattaaggcggggctgaatgcggaactggacggacagtcgggcattcaggaactggcaggcgacgctaccttgctctattatctgacggatgaagcccaggaaggtaagaacgcatttctggagaaacgcaagcctaacttcaagcagtatcccaaattcccctgacacccgtaatggactgcaagatagagattatcccccggttgctgcatttcaagcagccggcggggacttcccgcggggtgtatacgacccggaaagtgtggtatcttcatctgacctctcccgactatccgggcaggacgggaataggagagtgcgctccgctgcctgcattgagctgtgacgaccttcccgattacgagaatatacttgccggggcttgccggcggctggaacagtgcgggggagaactggatgcggatgtcttgcgcgactatccgtccatcctgttcggattggaaacggcgctccgtcatctcctgacgggcagttgggcattgtacgatacggacttctcgcaaggaaaggcggggattccgataaacgggcttatctggatgggcaactttgacacgatgctctcccggatagaggagaaaatggcagccggtttccgttgcatcaaactgaaaattggtgctatcggctttgaggatgagttggctctgcttcgccatattcgtgcacatttctcttccagggagatagagttgcgtgtggatgccaacggcgctttctctccggctgatgcgatggagaaactgaaacgcctgtccgaactggagctgcactccattgaacagcctatccgtgcggggcagtgggaggaaatggcgcgtcttgctgccgactctccgctgccgatagccttggatgaagaactgataggctgcaatacgccggaagggaagcggaagctgctttcggcaatcaatccgcagtatattgttctcaaaccttctttgcacggcgggatatgcggtggcaacgagtggattgccgaagcggaaaaacggcatatcggctggtggattacttcggctctggagtcgaatatcggcctgaatgcaatagcccaatggtgtgccaccttcgataatccgctgcctcaggggctgggtacgggactgctttttacggacaacgtggaaatgcctcttgaagtgaggaaagattgtttatggttttgtaatgatgatatttaaaggtatccgatgatattcgaccgacaacgacagcgtttgctgctgcaaggaaaggagtatacggccggggatatatcccggttggtggcggagggagcggaaaactgcccgcccgccttgtgggatttgtatctttttctggagaagtggttcgatgcctctccggttatcaccgtccatacgtcgggctccacaggcacgccgaaagagctggtggtgcgcaaagaccggatgatgcagagcgcccgcctcacttgcgagtttctgaacttgcaagcgggagataccgctttgctgtgtatgaaccttcgttatataggggctatgatggtggtggtgcgttctttggttgcggggctgaatctgatagtgcgtcctgcttccggccatcctctttcggatatagaagagccgctgagatttgcggcgatggttcctttgcaggtttataacacgctccgtgttcccgaagaaaaggagcggttggagcagacggatattctgattatcggcggcggagcggtggacgacagtctggaggcggaaataagcgctcttcccacggcggtctattctacgtacggcatgacggaaacgttgtcccatatcgcattgcgccgtctgaatggagagaccgcttccaagcattattatccttttccctcggtcgaactgtccttatccgctgaaagtacgctggttattaaagctccgctgatttgcggggaggtcttgcagaccaatgacattgcctgcctctatcccgatggaagttttaccattgcaggccggaaagataacgttatcaatagcggcggaatcaagatacaggcagaggaaatggagaaaagactacggccgtttatccctgtaccgtttgtagttacttctgttcccgacccgcgtttggggcaggcgcttaccttgctgattgccggacaggtggatgtaagagaactggagagtaagttgcagacggtgctggatgcctatcatcgccccagacatatttttatgacagaatcgataccgcaaacggagaacggtaaaacagaccgtgccggatgccgtatattagctcgacaaatgaaaaaacttcaccctttgatgtttgccggaaccggtagcgatgtgggcaagagcattatagccgctgccttttgccgcattttcaggcaggacggataccggcctgctcccttcaaagcgcagaatatggcgcttaactcgtatgccactcccgaaggactggagataggacgtgcacaggccgtgcaggcggaagccgccggagtgccgtgccatacggacatgaatccgttactgctgaaaccccagtcggaccggacttcgcaagtggtattgaacggtaagcctatcggcagtcgtggtgcatacgactatttccgcaaggaaggacgcgaggagttgcgcagggaagtatgtgcggcgtatgaccgccttgcgcagaaatataatcccatcgtattggaaggtgcgggcagcatctccgaaatcaacctgcgcgaggtagacctcgtgaatctgccgatggcaatgtatgccggtgcggacgtgattctggtagcggatatagaccgtggcggggtctttgccagtgtgtacggttcggtaatgctgcttactcccgaagaacgcaagcatgtaaaaggtattcttatcaataaattccggggagatatacgtctcttcgagtctggcgtcaaaatgctggaagagctttgcggaattccggtggttggggtggttccttattataaggatatctatattgaggaagaggattcgcttgcccttgccaccaaatcattgcaggcggagcagggtaaggtgaatatagctgtggttctgctgcgccacctcagcaacttcacggatttcaatgtgctggaacgtgacccgcgcgtgcatcttttctataccaacaacaccgacgaactggcgaaggcggatatcatcatcctgcccggcagcaagagtacccttgccgacctctatgaattgcgccgcaacggagtggcgcaagccgtcatccgcgcccatcgtgagggaactgccgtgttgggcatctgcggcggctatcagttgatggggcaggaagtgctcgaccccgaccacgtggaaggggagatagaacggttgcccggtcttggactgctgcccgtaagtacacgaatgacgggagaaaaggtgacgcggcaggtgaacttccaacttcttgaaagctgccgtaccgttgttccgcaaggtaactcttccccctcaaatttcaacaaccaaccttcagcgtcccattttcagctaaaaggctacgagattcacatgggtagtaccgtaccggtggagggagcgtccgcttctccgctgaaccggttggaaagcgggcaatgtgacgggtatatcgtggaccgtacgtgcatggggacttacattcacggcattctcgacaatccggagtttatcgacttcctgctcgaaccgtttgccggtaaattgtcggaagcagcggaaacgttcaactaccggcagtttaaggaagagcagtacgacaaactcgccgaccatgtgcggcagcatgtcaacctgccgcttatttacaagatattgacggacaacaattaaaatcggatagaatatgattgacggacacggagacgattcctataaatacagccgcccgataacggcaaatttcagttccaacgtgtacaacgaagtgaatctttcccgtttgaaagctcatctttgcgaatgtatcggggagataggcaattaccccgaacccgaaccctatacgttggaagcccgtatagcttcccgctgtcagctgccgtccggagctgtttgcgtaacgaatggcgcaacggaggccatataccttattgcacagactttccggggtacgaatacagctatcctgcaacccactttcagcgaatatgcggatgcctgccgtatgcacggacaccgggtgagttcgctttatcaactgccgaaggagcaggacgggtatcgcctgccggacgatgtgcggatgctgtggctctgcaatcccaacaatcccacgggaacggtggccggtaaagaatatatgcgcggattgattgaacataatccgcaggtttgttttattatagaccagtcttatgagttctttacgctgtgtccgcttttctctccggcagaggcggcggagtatccgaatgtactgctgctgcattccatgacgaaaaggtatgcgattcccggtttgcggcttggatatgtaacgggcagctccggtttgctggagcggctgcgcaccaaccgtatgccgtggtcggtcaaccggcttgccattgaagcaggacttttcctgttggagaacgatgtgcccgaaccggtggatgtggctgcttatttgcaggagacggcgcgtctgggcaaagcgctcaaagccgtaggcggattggacgtttgggatacgcagacgcattttatgctggtgcagcttcgcatgggcaaggcgtctgccttgaaagagtatcttgccagggagcatggcatacttattcgggatgcgtccaactttgcggggctggacgagcgctttttccgcatagccacacagacaccggaagagaacgacagactggtggcggcgatagaggaatttatggcggggtagagccggcgtaatagtagaacctgagtgataaacattttatggaagatataatcatatttttaggcattgctttcaatctgaacctgccgctgcttacggcatggctgctcgaccactggttgggcgatcctgtctggctgccgcatcctgtggtggctttcggaaaggccatctcgttctgtgagcatcgtctgaataaggggaatgcccgttttctgaaaggggctgtcatgtcgttggtactggtggcaggcgtttatctgcttacattgttcctgctgcgttgggcagcgcattattctcccggtttgcttttgactttgcaggtgctgctcatcttttattgccttgcgggtactacgctggtgcgagaagtctgcggggtgtttaaggctgtagaccgttcgttggaagagggaaggaagcaggtagcccgtattgtggggcgcgacacttccggactttcggcgcaggaagtacgtacggcggcattagagacgttggcagagaacctgagcgacggcgtaatcgctccgctgttctggtatatgttgctgggtgtgccggggatgcttgcctataagatgataaatacactcgactccatgatagggtataggaatgaacgctatcgtcgattcggctgtttcgcggcacgtctggacgatgtagccaactatatccccgcccgtctgacggcttttctcatggtggcggtttccggcagattcccgttgctgctttttgtggggaaatacggcagcaagcatgccagtcccaattccggctatccggaagcggcacttgccggaatattggactgccgcttcggtggtcctcacaactattttggcgaggaagtgtggaaaccttatatcggcgacaatgaacggcctttgacaaccgaagacatgaggattgccgtgcgcatcaaccgcagtgtggaatggataatggtaatcattgttgttgctaccgctacctgcatgtacgttattccctcattcttctgagtgctaaagggtaatcctgacgataccgccatagggtgtcagtgcgctgaatgcctcttcgggtttgatgatgccggcatatatctgtgcgcaaatcaggacgccgccgtgggcaaaaacggccacccgctggtagggctttcctttcagctcatcgagaaagtcgctgacacgccggtactgcatggcgaacgactctccgcccgtagccgctacattcaaatagtcggcataccactcctgtaggcgtgggtcgtcgttgcggtcgaaaggtttcatttcccaactgccgaagtttatttccataatccgtttgtcacgttctgcatccggatagccgcaataggtggcaaggcgtacgcagcgcgtaagcggactggtatatacatggtcgaaaggcaaaaaggctttcaggttctcttgggtaacggctgcttcctgttcgaatgtcggtttcaggggaacatccgtttgtccgtagcatacgccgggcggtacatcgacggatgtgtggcgaataagtataacttccataatttttcagattaaatgtttaatgaaaataaaagggaactgagacaaagtccgtaaggaaatcgattccaaaacctgcatagacatataccaatacaaggctgcctatgtagaatgccagttcgcaaagcaggaaagccgctccgcagcaatcacccgtatatccttgcaggcggtgtttcataaggcggcacagcagtacaaatgcgagcagcgggaagagggtggcaggccacatctttaccggcaggagcaagacgaaaggaagcaatccgcagatgaaggcggatatcaattcctggcaactcatgcggttgtacacgactttagccttgctatcttcttcttttcgggcgtatggcaggcagttaatgagttgggatgcgcagaacttgcaccagcagtcgccgcagaagacaaggatacaaaggaaattcagaggcagattgcgcatctgtaacagcaataggaaatagaatatcagtccgataactccgtagcttcctatatgggaatctttcatgatggcaagcgtacgctcgcgggtggtgccgccgccgaacccgtccagaaagtccgctaacccgtcttcgtgcaggcatcccgtaacaagcaggcgggcgatgatggctataatccaggcaagggatacgggcagtatctgtccggtcagccagagagtgcctgccatgatgccgcccgtcagccagccggttagcggccagtagggtactacatgcttgaaacattcggcgggtacttccctgattttccaaaagggcagtcgggtgaagaagataaatgcagccagtatgttcattatatataggtattgtctataaaattaaaatatgggtactatcaacaaagttatatatgttatctataaaatggttctctgcttaaagatgccgtttgaggggcttcttaaaagtatttggtgatggaagcgtgtgcgaagttatccatttcattaatcatgcggacagccgattctataatgggatatgcacagatagctcccgtgccttctccgagtcttaatcctaagtgcagcaacggtttggcatttaatgaatcaagtgcaagtttatgcccgtattcatctccgcaatgtccgaatacggcataatgcagcacttcgggatacagcttggcggcggcaaggatacagtttgtcatgatgaagccgtctaccagaataatcattttcagctcggcggcttgcagcatggcgcctactgccataaccatttccaagccgccgaagtagcggatgatgtcacgcggcgaaccgtctcctttgtagttgtccaacgactgtttcaacacttcgtacttatggcggatgcctgcatcgtccagtccgcttcccgcaccgacgcattcttttagcggaatgccggtgaagcagctcatccatagggaagaagaggatgtgttgcctattcccatttccccgaaactgagtatgttactgccttcttcgcggcaacggcgcaccacttccgcaccccgttccaggcaaagttccatttccgtttcggtcattgcagcttcgtgcagatagttgcgtgtgcctttgcgcactttcatattgatgatgcctttttcataaggcaggtcataatctactcccgcatccactatctttaatgtaaatccgtgctggcggcacaggaaattgacgccggcacccccatgaaggaaattactgatttgttgccaggtaatttctttgggtgagaggctgacaccttcctctacaataccatgatcggcagcaaagatgatattctgagggtgttgcagaatgggagtcaggctttgctggataagccctacctgaagcgcaaggctttccagcattcccaaagaccctttcggcttggtcaggttattgattttctcaaccagtgccggtcgtatagcttcatccggtcctattatatcaaatgtcttcataattttataccttatacttcattcttatattccgtacttattcacacttaatttttgttgcaatccccgacaccattaaaatcacttcatctgcccgtgaagccacatactggttcatccagccttgcatatccgtaaacttccgttgtatttcgttttcggatgtgccgcccatacctatctcgttggtgacaaatataaatgtggcatcctgtgccgtaaagcagtcgaattcggctttggctgcggcaagggaacggtctgtatcggcatccaggtcgaaaaagaagttggtgcaccacaacgttatgcagtctatcagtacggtgcgtccggacagcgagtggcggctcagctctttatcttcttctatgtttgtccattccggtccgcgcctttcctggtggtgtatcacccgtttgcggaattcttcatcccatatacgtgccgtagcgaggtagacggggttgggcgagaggctgagcgccagcttttccgcataggtacttttgcccgaacgtgctccaccggtaataagtatgattcgtctcattggtttgcttgaagtttttatgaaagcaaatgtacatgatttctgcggcagtggcaagaatagagtatttttttagcggtttcgttttttcttttttaaaagatttcattacctttgccgatgttttcagaataaagggaaacgaaacctgcggcaatagctcagttggtagagcatcagcttcccaagctgagggtcacgagttcgagcctcgcttgccgctctcttgaaaatcagatagttatcgcaagattactatctgatttttgtttttaggcaatggcagttgaactcgcagttgacgggtcaacgtaacaatctgagggattttatatttaagcatataatttagcaagtctatataagaaaagagctctatctcttactcctctgaactgtgctctaaatgctttgattttagcattgaatgactctgctgcggcattggttgccctcctttcaaagaaattgattatatccagataatgtgtttgtatagaacgtgcgacccttccaaaggtgaggaaccctgatttatctacttcatcataccaccttgccagccttgtcaaagcaatatccttaaacttacactgatgatagattaagcctaaccgcatagacagataatatcctttctttatatcgggatattccttgaaaagaatttcagcccgtattctttgagactgagtccataaggattccttcttgtaaagcagataaatacttctcgctaacaactgctttcttgtatctccattagcgaaaacaggtgcatgatacatctttccacaggcctttgcataagcaatctgagtggactcttcatccaaagcctcccagcgagcttttacacgcatctcctgcacagattcataagctaacttctgtacgtgaaagcgatcggtaacacgtttggccgcaggaaagcagatgcgtgcaatctgctccatgttaggagccatatccaaggttatctcgcgcacttggtaacggcggcgacgggagagcttaagcaggacagaagtgaccgtatgaacgtccgtacctttaatgatggcaatcatactacctttaccaccgtgagcttctttattggtcagtacagtatagagttccccacgcgagagggctacctcatcaatacagatataagcaccgatattcttttcgaatagtagccaatcctctgcatgaacaagttggtcccaatggagataaccacttagatggttacggtattgacgctccaataaatccccgtcaactccatataaaacacctaagagcttgcaactgatcggatagctatcaatatagttcttttaaaaaagacgcaaaatcctgcgtcatacgagtaccttcagccaccatacgccagttacgggagatatactcattatgcttctttaagagccagcgacgacgacgaatattaaggaagaccttcttgccacgaagaggaaaatcctgaacaataacaggagcataaaagcctttactctcaatatcctgatctgtatacttctcaggaacgatatttttctcctcaaggtagaatacaacttcatttacactttctttcacatcaacaagatcaaagtagtctaaagtgccttcaggaagaagaaggcgataaccgtttaactccataagctatgaatttggagacaaagataacaatttataaatttacccctcaggtttttacattgaccccagttgaccctatgagctcaactaaaatcttatgaatgcaacgattaatgtagtatgctacaagtggaaaaccttagcaaatggtgaatacccatctgtatgagtgttgcaattttaatggtatgctacaaatcaaagacattatctgtcccgataaagagtatattcagaaaatcttcttgataagcaaacagagttacagcaacgaatcatttgctgttttttttaaatgttacagctaaatcattgtgatttaaaagggaataattacctttgtattatggatggtaaagtaacttattggattgaaatgtcagattatgacttggaaacagcagatgcgatgttgcttacaggccgttatctctatgtgggcttcatgtgccaccaaacgatagaaaaaatactcaaggcatattgggctaatcgtttggtggaagtacctttaaagatacattcgctatccagattagcagagagaacagaattagataaagaactatcagaagaacagttggatttcattgatacacttgagccacttaatattgaagcccgttatccctcttataaagagagattgatgaaaagtctgactaaggaatattgtataggacttttaagccaaactaaagaattacagtcatggataaagaacaagctatagtcctcgccaagcgatataaagaaatggtagcagaaagattaccattaaaggctctctatctctatggctcgtatagcaaggggaattacagagaggatagcgatatagacattgcagtagtagtagagcatttggatgacaactattttgaagatacccctctattatggaaacttagacgtaagataagtaaccttatagaacccgtcttgcttatagaggatatgagtaatcctctttactgcgacatcgcaagaacgggcattcttatctaaagaaatgatacagaataagaaaagctgtatttgaagttggttatttttaattcttggcatcatcctaaagttaaatcacagaaagaggatatgtttaaactaaaattcgcttgccatttgtttctttttaggcacgggattacacagaaaatatagattttctttgttctttttccgtaaaatccgtgtaattccgtgcctaaaagaaatctcaagtgtattttttgacaccctcacaagttcgaatctcgcttgccgctcatacagagaatcagatagtcatcgcaagatttctatctgatttttgttttataggaatatgtcaagccaccccttcacctttcacaactccctgctcatgcagtatagcgggtgaacccctgtttttgtaaacgactgattatgataactcgcaataggaaaaaagttctcatttataaagtatgcaaaaaatagtgtttacacaataaacacttttcgcacagaaatttgtacttttgcactccgtttaatgaacccgaatagaaaactttaaaaacgaaatagaatggcagtagaattgaaagaccttaccaaacgtagcgagaattattctcagtggtacaacgagttggtggtgaaggccgatttggcagagcagtcggctgtgcgcggatgtatggtaatcaagccttacggatatgcaatctgggagaagatgcagcgtcagttggacgatatgttcaaggaaacaggacacgtaaacgcttatttccccttacttattccgaaatcattcctcagtcgcgaagcggaacacgtggaaggctttgccaaagaatgtgccgtagtgacgcactatcgtttgaagaacgacccgaatggcggcggcgtagtggtggaccccgctgcaaagctggaagaagaacttatcatccgccctacttcggaaactattatttggaatacctataagaactggattaactcttaccgcgacctgcctatcctgtgcaaccaatgggcaaacgtattccgttgggaaatgcgtacccgtctgttcctgcgtaccgcagagttcttgtggcaggaaggccacacggctcacgccactcgcgaagaagccgaagaggaagcagtgcgtatgctgaacgtgtacagcgaatttgccgagaaatacatggcagtgcccgttgtcaaaggtgtaaagtcggccaacgaacgcttcgccggcgctctcaacacctataccattgaagcgatgatgcaggatggcaaagctttgcagagtggtacttcacacttcttgggacagaacttcgccaaagctttcgacgtgcagttcgtaaacaaggaaaacaaactggaatacgtatgggccacttcttggggagtatctacccgcttgatgggtgcgcttatcatgacacattccgatgacaacggtctggtgcttccgccgcacttggctccgatacaggtggttatcgtacctatctacaagaatgccgaaatgcttgccaagattgacgagaaggtggcaggcatcgtagccaaactgaaagcgatgggcatctccgtaaagtacgacaatgccgacaacaaacgtccgggcttcaagtttgccgattacgaggtgaaaggtgtacctgtccgtctggttatgggtggccgcgacttggagaacaatacaatggaagtgatgcgccgcgatacgctggagaaagaaacccgctcttgcgacggtatcgaggaatatgtaaaagacctgcttgaggaaatccaggcgaatatttataagaaagcattggattatcgcaacagccgtatcactacggtggacagctatgacgagttcaaggaaaagattgaagaaggcggctttattttggctcattgggacggaacgaccgaaaccgaggagaagattaaggaagagaccaaagccactatccgctgtattccgttcgattctttcgtaccgggcgacaaggagccgggcaaatgtatggttacgggcaagccgtctgcttgccgcgtgatatttgcacgttcctattaataaggatatttttcactttgctggatgaagcttttttcatagtaacctgtgacgaagtttctttccttttgtattcggcagatgttctaaaaaatggaggtgtgctaaaatttagcatgccttctttcttatgcacaaagaaagtgcatcattatgaggtgccccaaaaaagttaaacgttcaaaacagccaaggctatcgaagtggtttatatatacaacaattcattcttcatcaggccggagaaattttccatcatagagttattcagatagtttccttggcgtgatatattttgtatgatgccattattcttcagcatgctgataatactatccttgatctgagcgcaataacagggtatggaggctcttgtgtttcttaaatgcctatttaagcatatctgttaccattttcaggttagggctgcgggagagtgtattgttattatctccccattgtatatgtcgcgtattgtttcctatcaaacctttataaaagtgatagtgatgtttcttttgctttgctttcaatctcatctgagacatcagtttctgcatagtcttatgattgatattgtagcttttaatcgcgtaaagacaaacagcttcttctatattcatagcggcctttgctgtcatcatatattgtcttgatacattttcttatatcattataaccatcattatctctcagacgcaacagatggtaataaaatacggagcgagcatctttaccattttgagaatactctcaagagggaatcctttcagtcttagttcttcgacggcccgtgcccaatcgcgtagctgggcataggagcctgctgttcccataggggagtgacgcatacaagacagaaatggctatggctgtcccaatagagtatcaggaatgcttttcctactgcctgataatctgctaatggcaggtagtcgtaagaagcatgcaaatttttgctttatttccgtcggtcagagttacttcgtgcattttgcatcccgctgcgggtttcgtagctaatcgaactaatatttaattaattgttcggtagctattagcagataaagatatagtttttagtaatgtgttggggagaaatttactaagaataaaaaatcccccgttaaggacgagggaacctaatgttttcacaacggaataatccttattgtgatttgcttcattttagtttggcaaaactataaaataaaaatgaaaaaacaatgcttgtattaataaaaaaaataactttgaatagcgtattaaaaaataatattatgaaaacgatacttggacttgatttagggagtaatagcataggatgggctgtaataaattctgtaatagaaaaacagtccgaacgaatttggataaaaatggcagggagtagaattattccgatggattccgctgtattgggagattttgacaaaggaagttctatatcacagactgctgaaagaactcattttagaggggtacgtcgtttgagggaacgacaattgctacgccgtgaacgattgcatagagttttgaagattcttggcttcttgccggaacattatttaaaagaaatagattttgaaaagcatcccggacagtttttgacaaactgtgaacctaaactgccgtggcttatggatgaacgaggaaaatatacttttttatttcaagcagcatttaatgagatgctagcagattttgcaaaacatcagccttcattagtgtctgatggtaaaaaagtaccttatgactggacaatttactatctccgtaagaaagctttaacagaaatgataagtaaagaagagttggcatggattcttttgaattttaatcagaaacgtggttattatcagcttagaggagaagaagaggaagatgctgcaggaaaatctgttgaattttatgcattgaaagtattgtcggtagaagcgactgatgaaaagaaaggtcgggacatatggtataatgtgcacttggaaaatgggtggatatatcgtagaagcagtaatgttccattggattgggagaatcaggtaaaagagtttatcgtaactactgatttgaatccggacggtactcccaagcttgataaatatggtgaggtgaagcgttctttcagagttcctaaagaggatgattggatgttgataaagaaaagaacagaggcagacatagccaatactcgtaaaacggttggaagttatatttatgatactttgttacagaaaccgcaacaaaaaataatagggaaactggtgaagacagtggaacgaaagctttacaaggaggaactgaatttgattttgcagaaacaatgtgcttttcatgcagagttacgggatagagatttatatatgagatgtattgaagcattatatccgggtaatgagatgcgacggaaaaatatagttaacagggattttatttatctgttaatagatgatattttgttttatcaaagaccattgaaaactaaaaaaacattgatttctaattgtccttatgaagaaaatgaatatgtaaaccgagaaactggcgagatcaaaaaagctcctttaaagtgcatagccaagtcacaccctctttttcaggagttccgtttatggcattttctttcaaatattcgggtatatcaaaaagaaaaaaaagtaaatggaactttacatttagatgtggatgtgacagcggaatttttgagaacagaagatgattatgtagctttatttgattggttgaattctcgaaaggaaatagatcagaaagcttttctgaaatatccaaaatttggattgaaaaaggaaatcgataattatcgttggaattatgttgaggataagttgtatccatgtaatgagacgagatatgcgattctttcccgtttggagaaagtcggcgttagtattgattttttgtcagatgagaaagaaacagtcttgtggcatattttatattctgtaagtgataagcaggaaatagagaaagccttacggacctttgcagttaagaacggattaaatgaatcttttgtagaagtattcaaaaaatttcctccttttaaatctgaatatggagcatattctgccaaggcaataaagaaattgttgcctttgatgagatgtggaaagtattgggatacatctttgattgatgatgcgacgagagataggatagaaaggataataacaggtgagtatgataggaatatagctgctaaggttagagaaaaggcgataaacttgtcggatatatattgttttaagagacttccgctatggttggcttgctatgttgtatataatcgtcattctgaaaataaagaaattgctaaatgggaaactccggcggatattgatgcttatttggcttctttcaaacaacattcactacgcaatcctattgtagaacaggtgataacagaaacactgagggttgttagggatatttggaaacaggttgggaaaattgatgaaattcatattgaattaggacgtgagatgaagagtcctgcggacaaacgaaaaagaatgactgcacaaattcaagagaatgaaaaagctaatctacgtataaagacattacttgttgaatttatgaatccggaatatgaggttgagaatattcgtccctattcaccaagtcagcaagaaatattgcgaatttatgaggatacggttttgaaaagagaagaaccgattccggaagatatagatgcaatattgaaaaaattcaataatagcaaattaccgacaaaatcagagtttttacgttataaattatggctggagcagaagtatcgttcgccttataccggtgagttgatacctttaggaaaattgttcacgactgcgtatgagatagaacatataattcctcagtctcgctattttgatgattctttttctaacaaagtgatatgtgaatctgctgtgaataaactgaaagataatcaattggggtatgagtttattaagaatcatcatgggcagaaagttgaagtgggttttgggaaaaaggtagaaattctttctgtggatagttacgaacgatttgtaaaagaacaatatgctaaatcaagcgtgaaaatgaagaaattgttgatggatgatattcccgaacaatttattgaacgccaattgaacgatagtcggtatatcagtaaggttgtcaaagggcttttatcgaatattgttcgtgaaaagaatgataatgatggatatgaaccagaggctgtttcaagaaatgtgttagtttgtacgggaaacgtgacggacaggttgaaaaaggattggggaatgaatgatgtttggaactgtattgtatatcctcgttttgaacgtttaaacgctttgactggaacacagtgctttggacattgggagaataaagatggaaaaaaagtttttcagacggaattaccccttgaatatcagaaagggtttagcaagaagcgtattgaccataggcatcatgctatggatgcaatagtgatagcttgcgctacgcggaatcatgtgaattatttgagtaatgagtctgcaagccggaataccaatatttcccgttatgatttgcagagattgttgtgtgataagaatagagtagatggtggtggtaattatagatgggttataaagaagccatggaatacttttacgcaagatacaagggaggcattggataaaatagtgattagtttaaagcagaatttacgtataataaataaaacaactaatatttatcaacattttgatataacaggaaatcgtatttataaaaaacaggaaattggtgataattgggctgttcgtaagccaatgcataaggatacagtttttggggcggtgaatttgcgaaaagtaaaaagggtacggttgtctgtagctttggatactcctactatgattgttgataagagagtgaaaggtaaggttcttgaattgttatcatataaatatgataagaagaaaattgaaaaatatttcaaagagaatgttttcttttggaaagatttggacatagctgaagttgcagtctattattttacagaaaatacttctgaacctttggtcgcagtacgtaaatcacttgattcaactttcaatgagaagaaaataaaagaatcagtaacggacactggcatacagaaaattcttttgaatcatttatctgtaaaggggggaaaagcggattgggctttttctgcagaaggaatagaagaaatgaatcgtaatattttacagttgaatgatggaaaaaagcatcagccaatatataaggtgagagtgtatgaatcacgtggaaataaatttagcgttggtgtatcaggtaataaaggaactaaatgggtaggagctgctaaaggtactaatttattttttgctatttatgtaacagaaaatggaaaaaggacgtatgtgactgtccctttagacgtggctatagaacgtgagaaacaagggcttattcctgttcctgatagaaacgataaaggggataaactattgttttggttatctcctaatgatttggtgtatctgccaactgaagaagaacgggagttgggtaggataaatgaaccaatagatagggggaggatttataaaattgtaagttttacaggaaatcgtctgtatggagtcccttgtaatgttgctaatgtaatagttgataaattagaatattcttcattaaataaagtggaattgacagatgctaaagagtcaataaaagaaatatgtattcctataagagttgatagattggggcatataatagaagttaagtatagaataaatgaatagtataaagttatttcaagaaaagaaaatccgttctatgtggaatgaagaagaacaacagtggtacttttcagttgtttatgtagttggtgtgttggctgatatcgtgaattctacggactatttgaagaagatgcgaaaatgggatgaagaattggctacttatctggggacaaattgtccccaagtagaaatgttgacagatacagaaaaaaagaaaaactttggtaacaaatgtataggaaatagaaaattcggaattagttcaggagtgtatgaaagacctgtatgagcagaaaggttatccaaaggattggattgacaaacgtttgagaggacctaccattcatcagaatttgacggatgagtggaaagaaaggggagctatggaaaagtgactatgctattcttacgccagaaatatctaaggcaacgttgggattaagcccttcggattaaaatatataaaggactgacaaagaagaattagaacctttgtgactatatgcttgatttagaattgatattcgcgatgcttggcgaacacgtcactacggaaatttctcagaaagaaaaaccatatacatttactattgaaaagtaagttgtacagtgtggtggaaatgttgttgaagtagtgcgtgaacaagctgaaaaagaactaggtagaagtattattttttccgacaatttttgttggattcagataatcatgatgataccttaaaacttccttttgaggaaaacaacgaatgaataactttaaaatctgtatactatgattaagaaaacattttattttggaagtccagtttatctctctttgaaaaatgctcagttagtgattaaattaccagaggtcataaaaaacggtgctttgtccgagggtttcaagcaaatatctgaggtgactaagccgatagaggatattgggatagtggtattggataacaagcagataaccattacttcgggagtgttggaggctttacttgaaaagaattgtgcagttataacttgcgattctaaaagtatgtcggttggtttgatgcttcctttgtatggaaatacgacacaaaatgagaggttccgacagcaaattggtgcttctttgccattaatgaaacaactttggcaacaaacggtaaaagctaaaatagaaaatcaggcagcggtattgaataaatgtgttggagaggaaataaagtgtatgaagatatgggctactgatgtgaaaagtggagatccggacaatttggaggctcgtgcagctgcttattattggaaaaaattgtttaagatagaaggttttacaagggatagggaaggtattccacctaataatctgttgaattatgggtatgctattttgcgggcagtcgttgcccgtggtttggttgcaagtggacttttgcccactttgggaatacatcatcacaaccgttataatgcttattgcctggcagatgatataatggagccttatcgcccctatgtggataggttggtatatgatatgattaagggaggagaaataaattgtagagaattggctaaagaacaaaaagtacaactgcttactattcctacgttggatactattatttcgggaaaacgtagtccgttgatggtagctgttgggcaaactacagcttctctgtataaatgtttcagcggtgagttgcgcagaatatcttatcctgagatgtaatggaacggtttagcgaatatcgtgttatgtgggtacttgtactatttgatttgcctaccgaaacaaagaaagataaaaaggcatatgcagattttagaaaaaatctgcaaaaagatggatttacaatgtttcaattttctatatatgttcgtcattgtgcaagtagtgaaaatgcggaggtacatataaaaagagtcaaatcgattttacctgaacatggaaatgttggaataatgtgtattacagacaaacaatttgggagtatagaacttttctatgggaaaaagactatagatgtgaatactcccggacaacagttagaattattctgaaaagaaaatcccgctatatggcgggatttttttgggggaaaccacatctttttttaattctaatatttaatataaatctttgtatattaggttactattaataatgagctgtttccaatggttcaaagatactaaaatgaaagcaaatcacaacgtaatgccagtaataataaattaagcgggggctgtttccaatggttcaaagatactaaaataagaaataactcacaactatatgcaagatttcaaactacggtagaaaactgtttttgatggtgtaaaatataaaagatattgacataagaactaattatagtgcattcaaatgtgttttggaaacaaatatttccttctgaaaaatcttcttaatgattgtgtagttgtctaagtttgactacttttgctctcctataaatggaggcggctatgaaagacacattaattattgagcatttacgtaggggggatgaagaagcatttaagtacatttatgaacgtcattatgttctgctttgccgctttgccaatcagatattgaatgatgcagctctttcggaagaggtggtggacgatgctatattttatttatgggagcatcgtcgggagatagaaatcacgtattctgtccgtgcttatctgatgcgcgctgtacgtaatcgttgtctgaatgaattgcaatccttgcgtcatcgtgaggaactgcacttctcatcttttatgttaccggaaaatatggattttcttgattctgtttttgtggaagagaatcagcccttgggtgtattgctcgaacgggagttggaagatgagttgacccgcagtatagaagaactgcctgtggaatgtcgtaccgtatttaagaaaagtcgttttgaacaaaaaaagtacgaagagattgctttagagttgggaatctccatcaatacggttaagtatcatataaagaatgctttatctcttcttcaaaagcgtttggacaactatttgcatttattgattatttatatttttatggatatttgaaaaaatataaaatttcgactaccctcattcttgatttttttgtcttatatataaagcaacggaattatgcaactggaagaacatactgatatagatttattgataactcgatatctttcgggaaaaatggataaagaatcttttgccgaactgaaacgttggagtttggagtctgagtctaatcggaaatatgtacggaataagttagaggtttggttttcttcaggagttgctgatactgctgtgcagtttgataaagacaaggcattttctttattcaagcaacgtattatcggggctgagaagaaacaaaaacagatgttccgcttctcatggaagacatttatgcgggcggcggcagttgtactgattctgatgattccatttgctgcgtattggcagggaaagcaggctgtaaagcaaagctttgcagatatggttgtagaggcgcctatgggagcgcatacaaaactctatttaccggatgggacattggtatggttgaacgcaggatcgaaaattatatattcgcaaggctttggagtagacgaccgtcggttgcgcttggaaggagaaggctattttgaggtgatgaagaacgaagaagtaccttttgagatagacacgaaagagttggatttgagagtattgggtacaaagttcaatttcaggaactatccggatgatgaagaggtgacggtaaatctgatggaaggaaaagttgctttgaggaacggtatcagggaaatgcctgaactttatctgactccggacgagaaaatggttcttaataaggcgaccggacaaatggtaaaaagcagtacgaaagctgccaaagccaatgtctggattaacgacgaacttttctttgatgaagagctgctggaagatatagccaagaagctgatgcgtagctataatgtcaaggtggaagttgccgattctttacgtaacaagcgtttttatggaagcttcggtatttcgggcaatacgattgataagattctggatgtgatggcttcgacccagcaaatgaattataaatacgaaaacggtgtatatatactatattaatgttgaacttaaaaaataaaacatgagaaacaggagttgtatgaaatttactttttccggctgacgttggcattttgcttcccggacaatagtctggaagtcagctttacttggtaatttattaccaaaccttatttctattcattaattaaaaattcaaaacgtttatgggaaacttcagtaaggctattttaatagcctcagtagctctttgtcttcatatttccgctttttctcaaggtatatcgttgaaaaatagggaaataactgtaaaagaggcaatggaactattgaaagaaaaatctggttactcgtttgtgttttcatctgcggatgtaaatacgaataagcgaatttcaatatctacggacaaagcgacaattgatgatgtcgttaagcaaattctccagggacaaaataatctgacttatgaaattcagaataagcgaataatagtaaagaagatacaatcgggggacaagactaagaataaacgaattaaagccattggtaaggttgtagatgatgcgggggagccgatcattggtgcaactataagagaacaaggaacaattaacggaacagttacaggcattgacggtagtttttcgttggatgttgcagataacgtaaatttggaaatatcctatattggttatgagacacgtaaagtaagggctcaacagggcaagaagctggatataactatgcgtgaggatgcaaatgtattggatgaaattgttgtattgggttatggtaacatacgtcgtagtgatgtaacggggtccattgcatctgtttcatccgagtctatatccaaagttgcttcggcttctgtggccgatgctttggctggaaagatggccggtgtacagattactactgcggatggtgcgttggatgctgaaatcagtgttcgcgtgcgtggtggtggttccataacccaagataattcaccattatttttggtggatggttttccggtagatgatttaagcggtattccgccaacggatattgaatctattgatgttttgaaagaggcatcaatgacagctatctacggtgcaagaggtgcaaacggtgttgttatcgtgactaccaaaaaccctaaaatgggtaaaacaaccgtacagtttaatagctatttgcagatgcgtacattggcgcgtaaaataccggtaatgaacaactatgagtttgtaatggccgaatatgaatatcagatgattcgtaaaggttcggatgagggttttatcaaaaatttcggctactatgatgatattgatttatacaaatacacgaacactactgattggcaggatgaaattctaggcagtaatcctatttcgcagtattataatataaccgttaatggcggtaatgaaaaaaccaaattcaatttgagttatacccgcaataaagacgagggacagttgattggttcgggactgacacgtaataacattaatctaaaattgaatcatcagttgttcaagaatctgaaactggaaacaaatgcaacttatcgtacgcgtactatcgatggtgccggaacttcggggacaaatattgttactgcgcttcgttttcgtcctaccaatgggttgtcggcaggagttgccgtcgaccctgatgatgacgaggaaaacctggatggagatggaaattccctgaaccagaaatatactccggtggaagagaataaacagaattacagaaaacgtgacgaacaggctctcagcctgaaagctgctttggtatgggatgtgataaaaggattgcaatttcgttccgagtatggaataagcacgactcatgcaaatgacaatcagttttacggtccattgtccagtacggcttctgcggccggtatgaataatatgccttctgctaaacgcaccaaaacccataaggaatcatatcgtttggcaaatacgctgacctatcgtaactcctttaataagtctcacaatgtcaatgtaatgctgggacaggaaattaaccatgcgcagaacgataatacgtttatgagtgcaaagctctttccggtttctgtaacggcagaggcagcgttggagaattttgctttgggaactcccaatcagagtaccagttataaaagtgctcccgacagaaccgcttctttcttcggacgtgcattgtatgattacaaaaatcgttattatgctactctgacggttcgtgccgacgggtctaccaagtttgctcccggtaagcagtggggatattttccggcaggttccatcgcctggagaatttccaatgaaaagtggatgaagcctataaagttcatctctgatttgaagttgagagccagctacggtttggctggtaataaccgtattggtaatgatttgtggcataatatctatcgtgtatacagtggaacaagtgctcccgctttcggtaatgaggaatataattattatcagtttgcagaccagacttatctttacgatccagacttgaagtgggagacgacaataacccgtaatatcggtttggatttcggattctttagaaaccgtctgagcggtacggttgatgtgtattggaatacaaccaaggacttgttggttccttccatcattcctaattcatcaggttattcccgtcagatgacaaatgtgggacagacttcaaacaagggagttgaaatctctttggatgcaaaaatcattcagacaaaggatttccagctatcggcaaacttcaacgttgcgttcaacaagaataaggtagacaagttggctaccggtgaaaccgaatggaaaaccaaagcttcattatccaactggtatggaacgtataactataaaatggaagtaggcaaaagtatggggttgatttacggattcgtcaacgacgggttctataaggtagatgattttgatttcgatgcaactactaaaaaatggactttgaagccgggtatacccgataattcatcgttcagttccggtaactttgcttttaaacccggagctatgaaatttaagaaactgtccgattccgaatcgaacttgattactgaagatgatatgacggttatcggtgataccaatcctaaagtgaccggcggtttcggactttccggcaactggaagaatctggacttcacggcattcttcaattacatgtgtgattttgatgtgctcaatgtgaataaactctacctgcactcggctgtccgtcgtaattattccaacttatctacggatatgaaccttgccaatcgtttccgttatgtggacgatgccggtgtgaatgtttccagtgaccctgttgccttagcggcattaaatgagaacgccaaaacctattcttggatgtccgtaactcagggtataacaatgatcgatttggttgaagacggttctttccttcgtttgagtactttgacggttggttatacgcttcctaagcattggttgagatctttaggagttaagagcctgcgtttatatttttccggaagcaacttgtttacaataacaggatatagcggttatgatccggaagtgaatatccaaaaaggtttgacgccaggcattgataataatgtaactccgcgtagccgtgtttatacagtcggtgttaatttaaggggggaaaaacgaaacgtatcaatatgtggttagcctgaaaatggctgattgctttggtattcaaaatgttatggttgaatagagcagaacgggctggaaaaaccaaacgtttacattgctttacattgggcttacatttgagccttgtttgaacgccgttcaaatgaattactttacattaaaggcgagataggagatatttcggaagtgttattaccgattgttctccatgattcttttctgaccgctaagatagtcaaacaaacagatttatacaagtgagcgaggagatgcgtaatatacttccttttttattttatctaaattattccatatagataatatttggtatatttgtagtcaaataaatgttatataattatgactaaagttatccatgtgcacttgatttacgagaagaaaaacctctatttcggcagtatttctgccatatttgatactttgaccgagaaccgggttggcatcaccaaaagcagtctgttgcatgccggtttgactgatggagctgtaaaatacacgaaacgtgctatgattatccagtcacacctgataaagactaccagaaagggctaaaacagccttagaacgtattaaaagccgctttttgcggctttttttatgtctttgtggcaaaatagtacatctgaaagaagacgtcacttatttgaacggtttgaacgattggaaaaatgggaaggagttacacttggagttacatttggagttacaaaatacacagtgcaaaaacgaaacgttttgattggagttacatttggagttacattttaggtgtgtttattggtgttttcttgtatgaatacttcttttttgtagcccgttttattttgattataaactattacagggggtaaacaatactatataaataattatttgctcccctatattttaattcatcactctaataatcaataatttactacttttcaccccctttaccccgtaaaacgcgttttagacggcattggcaactgtagaatcgcttgcatccgaaacacgccccgacttgtcctgtttgagttgtacaatcatttgttttaatactcctatttcttctgcctgttcttttattgttatctgctgttcttttatggtagataaaagtttatcaaatatttcaggagaaaggccttggttgccatcgaatttttctttatctttatttttagaaacacagcttgtttgtatgtgttctgttggtgttggttggcttgtttttgtcatctcccccctacctgttagaagccattctgtatttatgtctgcaaacatgtttgcaattgaaaggaggatgtcactactaacttctggatattcattattccttttatccaaattaaatactctattaagtttttgagaacttgatagatgaatcatttcactaaagcgttttacgctaccattagcataaaaatcgactaattgttttactctttcatttacgactggtaaatgtcttgttgaaaaaatgttttcactttctcccattttatttttgtttattgaaaacatgtttgtatatttgcaacgtgttcaaagtttaaacacgctccaaagctacaaaaaaggcttgaagtaacaatgagaatttaagaagaagcaaaatggaagcaaaatttaaaaagggacaaagtgtgagaatcaccaaaaggaacggtgaggtcatcgatggtgtaatccgagactgggactataacatttgtactttcggtcgtgaatatgatgtcgattatatgaaagatggccagatttggactgtgatatgtgttccggagaatgcgataaaggaacttttataatattctcgggcggttagttcagttggtagaacacaccaaactcccgcaagggagaggtcatggtccgcggttcgagtccgcgactgccctctatgataatttaaataattagatagtatgaaaagaagaattgtggtagaatacggtgaggtgaacaagatcgccgaactgataggatgtacgaatgtaatggttagccatgcacttgcctttcgcaagaacagccgacttgcgcgttccatccgtaaactcgcccttgagcgtggtggtactgaaatcggtgaggacactcaaaagcctgattatgatgaaaaacgacttgcttgatatattcggtgacgagctgcgcaagttcgccagtctgagccggaagcaacgcctttgcgtgctttacttctgtttgagtcttgcgactttgctcacagtcttttttatccacccgctaccggagcttttcctggtgttgaatttcgggaattctgtacggttgctgaaaaagcatgttccgttgagtaatttgaagaattgataataattgaatcagggaatggaattttataataaagatttgtgtgtaacctatgaggaactgacttctggagatgatccggtcataaaagctactactctgcggcaaaatgtcgcccgtggcaatattgaaaacgcccaccgaggcggtggtgaaggcgggcgcgcactatacatttattcctcccttcccgagaagtacaagaaacgttgggttgagcgccatggcgagcccgagaaacagatgcgagaagaaattatccgtaacatagtgaagagagacgaaaaggccgagaactttttcgaggagtaccgttatgacaagaacggtgagctggtcgcccttcccgaggatgtgaagaaggaatacacctggaacgcttcagtactgaacgcgctgatggaagagttcaaacgtttgagttcatccaataacaagctgaccggtttccgccgcaacctttgggagcttctgcttgtcacgagtgaggagtggcgtccggtgtacgggcatagccttccgggaagtgtgggccggttgaaggccctgataaacaagttccgccccgacaactacagtgtacttgtgagcggcaaatatggaaacagcaacaccctgaaaatagatgaggaacccgggcgtttccttgtcgccttgaaacgcagccgtgttccggtctataccgacatgcagattttcgaggaatacaaccgggtagcccccgcacgcgggtggaaggccctgaaaagcccgcgcagtctccgttcatggttcagcagtccccgcatagagcctttatggtatgatgcggtttacggtgaaatgaaggcccaccagcgttacggccgcaagcataagaccgaactccccagccgccgtgacagcctgtggtacggtgacggtaccaaactgaacctttattaccgggatgagggcggcaaggtccgcaccatcggggtgtacgaggtcatggatgcctacagtgaagtcctgctcggcttccatatcagcgagaacgaggattatgaggcgcagtaccatgcttaccgcatggcgctccagacaagcgggcacaagccttacgagctggtccatgacaaccagggcggtcataagaagcttgaacgtgtctccgacggtctgcttgacaagatcagccatatccaccgtcccaccgccccttacagcgggcagtccaagacgatagaatccgctttcgggcgttttcagagccaggtcctgcacaaatactggggctttaccggacagaatatcactgccagaaaagattccagccgtccgaaccttgagttcatcgaggccaacagggaccggctctatactctcgacgagctgaaggcaaaatatgtcgaggcacgccgggagtggaacgaaatgaagcatcctgttaccggcatcccccggatagagatgtacgatacaagtgtaaacgaggacacggaagtggtgaccgcccgtgacatggtggacatcttctgggttatgacctcccggccgagcactttcacctctgccggcatagagttcactgtcggcggcaggccgcgcacctacgaggtctattcctcccccggtgttcctgaccatgagtggcgtcgccgtaatacctacagacagttctatgtcaagtatgacccttatgatttcagcagcgtccggctgtactggaaagacaagggcggtgctctccgcttcgaacgcgttgccgaaccgtacatggtggttcatcgcgcaatccaggaccagaccgagggtgaggcggcgttcatacgccgggaacaggaggccaacgtccatgaccgcatcgaacgtcaggtcgcagccaagtccatcgaatacgagcatggggttgcgcctgaacagcacgggctgcgcagccccaacctgaaaggtgtcacggccgaggtgcagcgccagatagaccgccgcacaaagaaatacagccggcctccggaagaggttgtcctgggacgttccacaaaggtaatcagtaacattacctgggaccagctcgggaagaaggaagtgagtgtgcgcaaagtggtaggaaaattatagcaggaaattttaaataagaaaaatatgagtgaattgaaaagagaagacaaggatgccatcagcgagagtctgagggcttatgtggcaaaatatccgagccagaccaaagcggccggcagccttaagaacacaagtgtcggaacggtgagcaacattctgaacggacgttatgagaatatcagcgatgagatgttccgcaatatagcctcacaggtcgggagcgtcaatcctaccggctggcagattgtggagaccggtgcctatcaggagatcaccggagtgcttgccgatgcgcagcgctggcgcaatgtcacctgggtgacgggggaagccggttgcggcaagagtaccgccgcccgcagttatcttcaggaacacagggaagttttctatatcctttgttccgaggacatgaagaaaggtgatttcgtccgtgagatagcccgcacggtcggcatacgcacggagggctgcaatatccgtgaggtctggagccttatccttgacgacattatccagatggacgctccgctccttgtatttgacgaagccgacaagcttaccgaaccggtattccactactttatcagcctgtacaacaagctggaggaaaaatgcggcgtggtcttcctgagtaccgactatatagccaagcgcatcagcaacgggcttaaataccagaaaccgggttacaaggaattttacagccgtatcggacgtaagttctatgcactggagcccactgacgagcgggatgtgtacgccatctgttcggccaacggggtgactgacaggaaaggcatcgattatgtcatgaaagaggcttccgcctgtgattttgacctgcgccgcgtcaagaaatccattcataaggtaaaacggatgacgggggaatgacccccgttcaaatgccgttcaaacgtaattttaaggatatggaaaataaatttgaatacctgaaaatcgacggccgcgaccagcttcccgctccctggagcgattatccagtcttgactgaatatgagacggtgaccgtttaccggaatggtcgcgactacctggacgcccttgtgggacagcaggacggctggtgggttgccggtgtacacatgcaggtgaacagttccggtgccggtttcaatccgggacgtaaatggggacagttctccacccgtgagaatgcccttctgtgggcactcggctggatgctctgccataagaagatgcggggtgctgcacggcaggccgtgcttgaccgaattgacaatatccggcaattaaaactgttttgaccatggaagaagagaaaaagaataataaaaaggccggcatgaggcgtgccttgaatgtcagggacattctgaacaagaagtatgacgtgtttcctttcgaggggaaatggaaggatgccttcgacactccggaagtccggggctgctggttcgtgtggggcaacagcggtaacggcaagacctctttcgtgatgcagctctgcaaggaactctgcaagtatgaccgtgtggcgttcaactccctggaggaaggtacttctctgacagtccagaataacctgcgacgctttggtatggccgaggtgagccgccacctggcgttcatcaaggaggacatccccactttgaagctcaggcttcgccgccataaaagctttaacatcgtgatcattgacagcttccaatacacacagatgacgtaccgtgactatatccagctgaaggaggagtttccggacaagctgtttgttttcatcagccatgcccgcggcaagaatcctaaaggcgatgcggccacgagcgtgatgtatgatgccgacctgaagatatgggtggaaggctacgtcgccttcagtaagggacgttatcagggttccactggtgaatacacgatctgggagaagggcgcctatgactactggaatgtggctggaccgaaacagaaaggaggccaggcatgagcaggataaagaaacagctggagatttgtcctcccgcctatatgtgtaaggggcctaaccgtgagaacttcgtcagtaccggtcacaagtgcggttactgcaagggcaacggctggttctggggaacggagaagggcagccgcgaggacgtgcatgtgccctgcccggtgtgtggcggcagcggtgagctggatgcgattataacagtggactggaaaccttcaaacaagtgagccatgagaaaggaatattatagaatagaaaggaatcaaatggaattaaaagaattgacattaaagatatgtgacatcttcggatgtagcagcattactacactgcctgataaggttatgtttgctttgttttctcagaatcccactttgtattttgagaagtacaaagagttatgccctgatttgactgtagattggatgcaaagggtatatcagttctaccacgcagacagaaaggaaaagaaacaagattatacacctgtatctctttctaagctggttgcttttcttagctatacaccatgcgagaaagttgtgtacgattgttgcgctggttccggttctctgactattcaaaagtggtgcactaatccggatttaaagtttgtttgcgaagaattggatacgaatgtattgcctatccttctgtttaatctttgtattcgcaatattgatgcgacagtggtaaacaagaatattctcactggtgatattatcggttcatataaggtaatcagaggttcaatatatggagttatacagcgtccgatgtttccggaaacagaatttctaaaagctgatgtaggcatttccaacccgccatttaatttaaaagttcctgtatctgaagaaataatcaaagctttacctcagaaatacacttgtaattttgctttcgtggcgcattgcctgcaaaggagtgaaagatgtgcgttgattcttcccagaggtgtgcttacaagcaaagaagagaaagagtgcaggagatactttattgagaagggatggctgcaagctgctatttctttgccggaaaagatgtttgagtctacctctgtagcgacttgcatacttttgtttgataagaagaaaacgagtaaagatgtgatgctgattaatgcggagggaatgaaatctgttgaagtaagagaacaacgtggagaaggtggcgcttctcattacaaccgcatctataaaaaggaatttaatactttttcagatgaacagattgctgctatatgcgaacttacagtaaaagaacaggattcattctctaaaaggctttcaatcgaagaactggagcaaaagggatacaatcttactattggctcatatctgccgatagaattaaaaggaactattcatcgagacttcaacgctataatatcagatattaaccgtgtcatcagagaacgtaatgttattaaggtgacagttaataaggtatgggctgaacgtcttggacttacagaaattataaaagattgcgaatcatccaatgaagtagtgaaagctatgaatgaaagttttgcatcattcaagaattacgaagtaaaagagaaaattattgagaataagtatattcaatcttccaatagtaaagtattttgtattgagaatactgataaggaaatattgtcaagcatcatgcctttctttatgaatatgtataagcagcatatttattacctaaataatgaagagaataggcttctttccgaacttagagattcgatgctgccgcttcttatgaatggagaattaacttttaaagattagcgtaaaacaaggtatgcgattataacagtggattggaaaccttcaaatatataaattatgggaaagaagaaagttatagaaaattgtgtgggtaccgttagtgtttccaccaggattcagaacggtgccgtaacgaccacttaccagttcaaggccggttttgctgctcacggctggactgataaaagggctaaggacattatccggaaaatgaagtccggtgtgaaaaatatgatttttgcggataaagaacattttggtatcactgatacgtccaaagtgacattttacggtggtgtcaaagttcttgagtgcgattatattcttgaaaaataacatattatcaaccattaaaatttaactgaaatgattacagaaaaacagaaagaggcagtaaaggaactctgcttgtacgtggaaaacttttgtaaagaaaataatcttagtgtctttatgagcgttgccgccagtgaggaccatccggacggacttgagcagatagcctgctcaatcattaccggcaagactgaacatattatcggctctatttctggggttgccaaagcgaataagaatgcctatatgctgctttccgtggggcttatgcaggcctacacgagaaaggctgacattaatactattccgttcagtggagatttgagtatgaactgatgaatgtggcgcaaaatcgaaagaagttaaatcatgaaagcaattgtaaatataactacatttagaggaattagcttcgaagctatacatttttatgggacgttacaaataatagctggtgatgatatagaactttaccgctctattactcaaacagaaatagataaagaccctgaacgttggtatggttacgatgaaggagatttaaccaagtcatttaactcgtggaaagatattgtaatagcagcaggtgataaagccaaagaaaagggtatcagccttgaagagatatttgttgaaggcatacccaacaccggaagcttaccctaccatgaagcactgaaaccaatagacacccgtccaagatgtaagaaatgtggtaaggtgtttgaatcaggcgaaggatgttataatactccaagggggttattttgcgtaaagtgttattaattcaaatcaaataagaaatgagccttgggcggctttgtaaaacccataaatacgaaatatggaaactgatattcaagaaaacaaaaggaagtttgaagaactgaaagaggcggcaaagccattgataaagtatctttgcgaaaactatcatcctcatgtaactgcaattgtcactcctacaagtgtagaggtaatggaagggattcaagtaattcccaacataaccgaatttatagttgattaatattctgccatgcggcaggcctaaactgccgtatggctcaaatcagaacaaaaatgaatatttggggacatattgtatgcttcttttgtggacacatgccttatcgagttacatggaataatactttatatatcagaatgaagagaaaaggtggtcaaaagcgaagtaagcatattaataaatatcacactaaacattatcgagagtattgtatcagatgcggtaaacttttaaaaaagaaataacattaccatgcagatagacatcaacacccgtaaacggttaaacaagcccgagaattactcggcgttttacagccttttgaaccgccttccgacatcggatcgtgacgcactgaaggaaagcattgtttcccagtacacggagggacggaccacaagccttcgtgacatgacgctgaaggaatacagtgccgctgtgtctgccatgcagaagttggtgccgcccacttaccgtgaggagctccggaagattctccgtcagaagcgttcggcggtgcttcaccagatgcagctgctgggcatcgatacggccgactgggatcgggtgaacgctttctgccgggacagccgtatcgccggcatggagttccgagaacttgactgtgaggcgttggacacgttacaggtgaagctacgtgccatccgccgcaaatgtgagaataaacaacagtaacaaccatttaattttttagttatggacttgaaagaacagttaaagagcttgtccgcacaggacagaaaagaattgctgaaacagctccagcaggaagagaaggaaaacaagcgtaaccggcgcgatgcctatgagggcctccgtgcgcagttcatgcttgaagtgaagaacaggctgtttccggtcgtggatgacgtgaaagccttccgtgactgggtagagaaggaagccgcctctttccgcgacctgatgcgtgactacggccagctccgcaaggatgaccaggcgagtttcaccatcgtggacggtgacatgaagctggaagtgaggagtaacaaggtgaagagcttcgatgaacgtgccaacctcgccgccgaacgtctggtggattacctgaagcgctacgccatgagccgggaacttggcaccgatgacccgatgtaccagctcggcatgaccatgatcgagcgtaaccgccagggtgatctggactacaagtcggtgagcaagctgtacgaacttgaggaccgtttcgacagcgaatacaccgaaatcatggacctcttccgtgagagcaatgtggtgtacaagactgcggtgaactactatttccacaagcgtgacgagaacggtgtctggcgccgtatcgaaccttcattctgtcgtttgtgatatggaaaatacaaagaatatcgcaccacacgtgatggcttgcagacgctgtgagggcaaaggacgtattttttacacggaccgggacggggcttcttcctcctgcaactgtcccgtctgcctgggcagcggacgtgtgaaggtccaaagcaaggtgattacccgtatcgaaccgtttgttcccggtaaggatgataccgaactgctgaccatgtgattttgttcacactctaaacagaaaaaacgccgcatccgttgtgattgtggcgtttttctttttcctgatatgccaaatgcctaattttgcagtaaataactttttttttatggccaaaggacgagataaggaactgattgaactccgtgatgcagccctgtgccgccgttactattactggacggaggtgcagcgcctgcgctttgacgatgccctgaaagtgttgtcccggcaggagttcttcatttcggaggagcgcatcatggccatcatccgccggaaatcacgcgaggataccggttacaacctgaagcccgtgcccaaggtgaaagccccccgtctgaccgccgcccagcttgagctattccccgtaagatgacggcatggccgattcatcgtgcagtgtgaatgagaacgtcatttcataaaccttgatataatgcggcatggcatacgagcggcttttctcgcgtaccagcggcgaagcgttgtccgtgcattgcaggcactgcagcgatctgtataattttccggccagctgctgcctttccctcaccttgtcatacgtgccggatgcgtagcttgtatcgtcgtaacaatcgatggccagccggacggtcagtacggattcgcttttctgtgccccgtatccgaggtcgtgccagtctgaactggtatttccaatcaatacgcaggggaaagtaaccgggtactggtcctcttccgcccccatttccaactgtccgtagtcctcgtcaatgagagagagttccggcagctcctgtgcaatctgttccatgattgcgataaaaatttcgtccatatcgttatttgtttaaaatgttggtaatttcctggtccaccttttccctgatacgccggttcaattcttcgctttcgcccatgaactggcgctgcgggatgcggatgtgcagtttcttctttctggtaagcgccatgttcctccagaactgtgcctgcggattcagttccttcggtttggaacgccgtttgacgcgtttcttttgccttgtgccggcttttcttctttttcccgaagccttgtagaacctggcccatgcaaagcgcctcatgcggtctgtgacggtgacatcgatttcgccgccccagttgtggacgggcgcatagacctcctcgttgaacactctcacccgatagtcggcaggcgtgtatccgaccgatttgaagagatgcttcctgccggagagcagcgttccgtagttgctggcggcatcagtaccgcccgaggagagacgtctggctttgggccaagggtggagtcctccatccacaaagccaccctgccggaaattgtcctggaagtggtcttttgccatgcggccaacggcgacgggcagtttgcggcgcatcatactgtccagtctgttacgtttccgctttatcagttccgtaaaatcttttatgtccataatcatcagtaattcaagaataatttataattttgcaaccgaggcttccaatatgccttttatgcgttatgaatataccggaacaagtgtcagaattagcaaacatccacggttataactccgttgttttatcagccagttcccctgaaggaagcatctattctgtgggctgtgttgacggggatggttttgagttgcctgtcggtcttcctacctttattctgttcgacggtcagtcctgccgtctggtggacggtgaggaggggctgacactttcttcccgtttatttggtgataaatagtcccatgattttaggatttatcagtttgttgtctattcttatcactcccacgcggttggctttcatgctctgtatgtaattgctgacatcatcctttccggtttgcggatcgaagaaccttgtcttcccttcagtcacctctgcgcagaacacgtgtgcagagccgcctttccaggcacaatatatctcgtatattccgtcctctctgaatttttccctgaagtattccttcagtcggtttgcgttcattacttgatacccctttctgacctgccatttataggtatagtcataatccggctttgttccatcccggttcaggaaacgttcttcccatgtgataccttgttttgccatttcattgtatgcgctttgtctgatgttgggttttgcctcggtgtcaaaccctaaccttctgagcatgtgtgttacggtgcaggtctggcaattcacgcggtatccttcctcttttccgaattttggattttcctttcccttgtttgcctgttcgtatgtcatcggcttacctttggtaacgccgagtgccttttctatcttgagattgttgcgggcgatgtcggttttttcctccagcgtcaggttgtctggcatttcggctatcatctcgttgatgcgtctggtcagtgcgtccacggctttttttgctcccggatacgcttcagtaacgtaggggtgtttgtctgagaacagtttgccgtcttttcccggattgttttccagaccgtcatgtgccttattctgcccattttcgtccggtactgctgtcggcgcttcatcggtggctgtaaggtcacacttgcagttccaccggtcgcccggtcggtggttgttccagaacggatcgtcaatcggtcggatggtattccaaaatgggcggtggtcagctcccggatgaatggaggtggacggtagccatttgagattgggcagaatatcgcgttcgcgcaggaactgctgccagtcagccgcctgatgcgcccggatgaccgccgtgtcatactccgtccgcagccagtgacgaacctgatgggaagcaatgggcaagacttcctgtacccatttgtcgaacggttttaaaatgccgtttgaatccaataaaagccgtgccatgtcattctgcatacgatgtaccttgaatgccgagaatacggcattgttccggagtatggcatttctgaaatcctcgtccggagtaatggccttggatttgctgaacccttcctttgccgccttgtccatcgttgcccatatttcattgaacaggttgatttcgatttcggttgccggatgaaagtccctgctgtatatgttcagcaaggcacgccgcagcacctcttcggaaaagtcaaactccatggagatgttgccattgtcagccgcatacagtctgtcgactaccagtctaaagctgccccgtctgccggggctttcacgaaaaaacctttgagccagttccggaagtttcttttctgtttcggtgtcggttcatcatcccgtcccttattcgccggttccggctctttcttcgggcttggaatccgggcggcttgttcagccgtcttttgttccgccttcagctgctcgtagttggccggtttgtcgataccgaattcctcatagagatagtcgtcatcgatggggatgttgaagtttttcttcagctgcgtaaggatggatattttggtaccggcatccgtttccttcggttccggaaagcaaaatgtccccccttcagtattgatgcccatgcgcagcagaatgtccgtcatgtcgtaattcagcacgttgagcacgtacttccggtcagcctccagcaccttgtcctccacctttttatgaaccgtacccaaagcctgtgtgcctttttcggacgattcggtggtcagcgtattgcccagtatcagcttggagatttcgttgttgcaccgttcgcagaggcgttcatagacatcggcagaccctgttttgtttccggcttccgtaagtttgagttccgtgtccttggcatgaaagaactgcgccaggcttccggcattcgccgcatcctccatggcccgctggcgggactcatcgtcatcggagtcatagatatattcctggataggcatgccgaatacctcggagaactgtgcccagtcgcccgtggtgttacgtttgtaaatgacccaaggagccgctttggccagcaggcccaaatcggacggtgaacccacaaaaagcaggtcggtatattcatcccaggaatggccggtagtgtccgtctggtgccgcaaaatgagttccctgaccggatctacatgcttgcgcggcaccaggtcgtaatccacccactcctgcagcttgtggaactggcagagcgagaacccccagaacttagcatcgaggatgtcgcctaccagccggttgaaccagggcgactgtatctgctcgttgattttatcgtccggtttcccgtccacccggaactccatgttggagcacagcacggcattcctgcgcttttcgattacacaggaaaggtgcgtatccatcagaatatcctcgtagaggtcatagagtttgtaacggcgtgagaaatcgacattctcggctgccctgacggctgccatgtaatctgaaatgtccagtccgaagcgtttgggctgtgtgagcacaatcacattcggtttcttctgtcccggcaaagcgaaatttccccctacggtgatgatgccggctttgtttctttttctgttcttctttttcatgatgcttgcttgtttaccagtggttcgttcgtttgcggttgctttgaatgcggaaatccgacctgcccgccctttgttcctcgggcagcaacggagccccttcgattgaaatatcctcgtcggccaccgccttcatccattccaccgcccgttcatagcggtccttgcgcacctgggagagtttctgcgggttatggatgcagaagatgtgatagaccgccatgtcgatgaccatcatcagcacgagctggttccggttctcgccggtggcctcgaaaatcttgttacagtcgtagcgtttgcccaagtagcatcgcatttcagcgatggccctgtcctcgcaaacctcaatgaccgtttcgtcttcgcgtaccagtgcgtcgaggatgtcgcggtggatgcttgcatcgtaatcggtgagttctacaaacttgctcataatttcttgaatttgtctattgtagtatttttattgaatagaagcatgacaatcagtgctaaagagacctttaacagttgctttttaccgacaattatgatattgctgcgatttaacccatcgtaagtcatgatactgtaccaattattataaggtggttgtactttgtaaatagatgttttacgaattatctttttcatttattttttgttttagagttgtcataatcttttcttgttccgctttcttacatccttccgtgaacggaatacgggcggttcaatgcgcctgatcagctcatcgatgatgcggtttgccccttcgaccccatccggtccgtcggccggatagcgcatggtcagtgtgaacagcttgaactggtcctccagttccttcatgtgcggattgtcccgttcggcctcgttgaggatgaggttcccttcgcggttgagcggttcgaggttggcttcgatacgcgtagccttgtccgtcttcttctcctcgtcgccccggatgaacagcgcaatcttctgttcgcggcgtacttttgccaccagtggtttgaacacctgctggaagaaagggtcctgcagcttgttgttctccatgtagcaatagacattggtcttgcccccgacaaattcaagcatccggacataccagtcaatgaactccgcattgagcgcctgcgccaggaaagtcttgatgacatagagcctggtgcccaatttgccacagagcgaaaccgtcttgaaggatttacctttcttacccttgctttcgcccggtgccgggtcgccatacaccacgaggaacttgaatttggagagaggcggtattttgccgtatgaaatgttctcgaatacctcgcccacggaaatcgggttgttgaaatattctccctgtgccgcctttttggatattttggacagtgtgcggtcgatgtcctcttccgagttcttttccggccatgtggaaaaaccgtttttgtcgcggatgttcacgatgtcccaggagtcggccatttcgcccgccctcaccacgcagcagtccttggcgatgatgtttccgcagaagatgaccagtgtaggttcggaaatggaacgtgtggggtacagcgcattttcccaccagtcccagcgcttctggatgatgtccggattcttggtgtcctcgtccgtatcaaagtcatcgaccagcagcacgtcaggacgtatggcctcgttacgcgaaccacgcggcgactgcccggcacccagtgcccggaacgaaaccttccctttggtggtgaattcgtcctccgtccatgaacccggcatttcctgtttgccgtagtatgccatgatgcgcccgttggcttcgagatttgcccggtagggatcgagcaggcgcaccgcattgtccttgctgttggaggtcagtataacattctttttgcgtccggtaagcgtgagatacatgacgatgaacatggtgactgtggatttggccagctcacggctccaggacagaacctcgaaccattcatcgtgtgcaatgatccgccggatagcctttttctggaaatcggcgaattcagatttggcataattcgggaaaaagaacctgatccattctataggatgtttctcaagatattcccggtgtttttcccgttcggctgccgtcatgttccggtcgaccggtgtagcccttgcgatgtcttctttgtacttctcccaatccaggagagcgagtctgtcagtctgtttcattgtctatccctttataatttgtctttaatgtacgcatcggccagccgggtgatttcctttgccttttcaaggtcggccgcccgtacccagtcgatgagtccggttaaaacactgatgatgtcggcaatgcccacttcctgctccatgttgcgtatggccgccgacagtttcccgagaatgtcagcctctctggatgaggggaaccgttccccctcgggccgttcggcgatggccttgtttatttcggccacctgccggtagaggttagccacctgttcctgccttgtgagcgtaagccccaccttctgttcctcccacttcccggcccgaacccaattggatactgacacccgcgacacgcccacacggtcggcaatttcctgctgtgtgaggttttccttgaggtacaaagtctttgcccattcctttttctgggcattcgtcaaatctgccataaatcgtcctttttaattgtaaatcacgttacaaaattgcatcaaaaagcggtctttgtaaaaggctgcgcgcatgatgccgggttgcagcggcatgataacaccggaaaccgacatgataaaaacgcggtttccccgtgccatgggaatgtcctattttcgcaccatcgaaacgcggggaaaccgcaggtaaagacatgacgatgagcagatttttcaatattacaacaagcgatgacggtatcagcacgatattcctgtacggggacatcggggactataccgaggtgcaaagcgggcgcatagcacaggaactgatggaagccgagcgggtgagccggcgcatccatatacgcataaacagcaacggcggggaagtgtacagcggtattgcgatattcaacgccctgcgccagagcaaggccgacatccgcatctatgtggatggcatagccgccagcatggccagtgtgatagccctttgcggcaagccggtggagatgagccggtatgcccggctgatgctgcacagtgtgagcggcggatgctacggcaacaaacaggacctgcagcggtgcatggaagagatagaaagtctggaaagcagcctgagtgagatttactccgaacgtctgggactggacccggacacgatcaggcaaacctattttgacggtgaagaccactggctgaccgcacaggaagctttggaccttggtttcatagacggcatctatgatgcagaccccgtgccggaggacagcacaccggcacagatatatactttattcaataaccggctcgttgagccacaaaaaaacagagaagacatgaatctggaagatgtaaagaaacgcccgcgcttcaaggattgcgcgagtgatgcggatgtgttccgcatgatggaccagctggaggaagaggcgggaaaggttcccggcctcacgcgggagaataccgacctgaaggcaaaggtgaagacctacgaggacaaggccgctgccgatgacattgccgcccgcaagcagttgcttgacgcggcagagaaggacggacgcatcgatgcgacgacccgtcccatctacgagaaccttctggcaaatgaccgcgagaacggcgaaaaggccttggcccaactgccggtgaagcgccgtgtgatggaagacctgcacctggaaccggacggtgaagaaagcccctggaacaggcgtatgcgtgaaatcaaggacaaacgtaaaaagtgattgagatatggcaataattgtaagaaacacgaattacagcggcgaggtactggaacagttgctgacacttgccgcgactaacaacgagattgtggaaaaggggctgatcatggtgattcccggtgtggagaagaaaatcagcctgccccgcctgaaaacgggcaagatgcttcagaagcgcaaggaaaaccccggtgtggaagattcaaagggcaacttcaactacgatgaaaagagccttgacccggtggacttcatggcctttacggtgttcaatccccgcacgttcgagaacatctggcgcaagtggcagccgaagggcaacctggtgttttcggaacttccgcccgaagcacagaacgccctgcttgccgaactggccaagcaggtgcagtttgaactgggcaaccattatgtgaacggtgagtacggcgatgacgatgaccacctgttcaacggcatcctgacccaaatggccaaggacaccgaggttattgtggtggacagtgcggaatcgaccatgctgggccgcctgaaggctctgcgcgtgaagattcccgtagctatccgcaacaacccggaccttcgcattctgatgagcgtgaacgactttgacaagtatgacgacgaactgacccagcgcgaggccaagaatgcaagcgaaaccgacgtgaatgcccgccgctacaagggcattaccatcgagacccttgccgcctggcccgatgacctgattgtctgcaccctttgttcgcccgatgccggcggtaacctgtttgcggcggtgaacctgcaggatgacgaggacgtgattcagattgataaaatctcgaatgccagcgaactgtacttcttcaagatgctgatgaaggccgatacgaacatcgcgttcggtgaggaggtggtggtgctggacaaacgtccgaatccggtgttcaagcccgcggagaaaaagctgtctgccgttccgaccgcggtgaccatcaagccggaaggcggcagccaggatgttgccgtgaccgcatccggcgagtacagcgtgagcgcatcccctgcgggctttaccgtgtccccgacggataacggtatccgtatctccgccgcagccaatacgacgggaaaggacaagagcggggctgtcaccctgacgctggactccgacaagaccagaaccgtgaagataaccgtcagtcaggcaaaacaggaggcgtaggcatggcaaagttgaagtatctggtaattcactgtacggccaccccggaggggcgtgaggtgtcatcggcggacatccgcaaatggcatacttctccggtgtgccggggaggaagaggctggaagcaggtgggctataccgacctgttccacctgaacgggggtgtggaacgtcttgtagacaacaacgaggacgccgaggtggacccttgggaagtgaccaacggagccaaaggttacaacagtgtgagccgtcatatcgtatataccggaggagtggccggggacgggaagaccccgaaagacacccgcacggcttgtcaggagaaggcgctggagaagtatgtgaaggatttccaccgccgattcccggatgttcgcattgtgggccataacgaactggcggcgaaagcctgccccagcttcgatgtacagaaatggctgaaagaaataggtataaaccaataaatcaaaagacagatgaaacgatttctattattttttgcactgatgctcggattcgtatccgtggcttttgcccaggatggtgtgacccctgaggctgactatgacgcgatgattgcgacttttgccggtttcgccggcggcgttgtcctccttgtggagggcatcaagaaacttttcccaaaaatgtcaggcatctggacgcagcttgtgagctggcttaccggcattgccgccgcgatgctgctttggtggcttgacgcgggctttgtggcggatgtggagtggtatatcgcccttctttacggtctgggttcctcccttgtggccaacggcattgccgatacgggtttcatacagtggctgatcggcctgttcgccagaaaggcgtcaggcaaatagccggttgtccggcctggatgcgctatggatttcaacgagctgctgaaccttgtcctgggcggcggtcttgccaccgccctgacggccctgataaccatcaggcctactgtcaggaaggcgaacgccacggccgagaccgtgcgtatcgataacgtggacaaggccacgcgcatcctgatagagaatattgtcgaaccgttaaaagaagaactgaatgcaacaagaaaggacctgcaggcgaacaaacgcgagatggcacggctcaggaaggctattgacacggccaacagttgccgccatcatgacgattgccctgtgcttggcgggctgcgcaagcagcaggaagagcacgatggcggagaagatacagacggaagcggcaagcgccgacagcgcgggcggaagtcggcgggcgggactggtgatggcggggataccggcgagtgcggtgaagctgacgataccgccggacagcctccgtaaacttcctgaaggtgccgtgtaccgtggtaagagcgggcaggcgaatctgaccgtaggcagcgacggcagcgggaacatcgtggccgaagcctcgtgtgacagtctgcagcagctggtgctatggtatgaagaagagctggcgcgcatccgcagcgagaccaggaatggaactttaaatgacgttcaaacggaagaaaaacgccctccgaacccggtacgggtgtttatcataggtgtattggccggcttgtttgccggtgtgttattaaccatcaaactgaagaaatgatgaacaagaatttcatgtacggcatcggtgccgtgaaatacaaggactttgtggtgggttacatcgagaaaggttcgttcgacctgggcggccagaaacccgaagccgcgaagattgaggctgaacaggcgcctggagccccggtgctggttattcctcagagcaacggcagcattgcccccacgtttaatgtaatccagatggactacaagaacctgcatgcactgctgggcggttcgttgcactacaagacagaggacagcgagaagaagaaccctgtaggctggaccgctccgcagaccgccatcctgatgcagggaccgtgggaactcagcctggtgtccggacagagcgtactgataccgaacggtacgttgctttccaacctgggcggcaagctgacgcttacggaaacggccaagatagaatgcacgcttgaggtggctatgccggaggacggttcgcagccctacggtgtgttctatgcggacgcccttccggatgagtggaaacagtacaagcttccggcagcggaagcagccgcgtctgtacaggccaaaagcagaaaggattaaggtatggccgaccgattggaacaactgatagaaatggaatgtgcggacgcgctgcttgacagcggcgtgtccgttcctcttaaaaagtggaagctgccttggctgaaacgtcccgtggagatgcgtgtgacgatgaagcggccgcgattgcgggggctgatattgctggccagggaatacctgaagatgggtgtcaagcccgactggcagccgaaagacaaggcggaggaactggcctttgtggcggagcatggtcaggcagtgagccggctgctggcctatacggtatgccggggctacgtgtcgtggcatgcgggtatcggtctgacggcctgggtactgcggaacttcgtagagtggcgctatctgacggccatgttccggacatttgagcggatgatgggcacggaggattttatgcgtattatcaggtcggtagcgcgggcgaacccgatgaagccgagactgagccgggcaaggaaggggagttaagaacccgttatgagggttcccatagccctttcggcttcgtgtggcagatagcgaccgcgaccggttggagtgtggactacatcctggacggtgtgaactaccagacgctgattatgatgctgggcgacgcgccccggtatgtgcgtcaaaagcaaggcagcggaaaccatgattccagaccggagtccagcgcggaagatgaagcgaatgatattgtaggattttttcaaagcagactggaatgagcaaacctgtagaaattgaatttttaatgaaggacaaactcacgcccggcatggacaaggccgagcgtgaggcgctggaactgcgtaataccgtcaggctgctggaggctgaactggaaaggctgcgccttgccggtgaggcagccgcccccaacctggaccaacgtgcgaacatcgcacagattaacgcgctggaaaagactcttgaggagttgcgttccaggctgaagcagctgcaggaggaatcggaatccgtacaggttacgcctgcggatgtgcccgacgcccgacgccagttgggcggcctgcacaacagcatccagcagatagcccgtgaaatgccctcgctggccatgggacctcagatgttctttatggccatcagcaacaacctgccggtttttacagacgagctggcccgtgcccggaaggaatacgacgagctgcagaagtccggcaaaaaagggataccggtatggaagcaggtgctttcctccctcttttcatggcagacagcgttcaccaccggcatcatgctgctggtgatgtacggtgacgagatcgtggcgtggacaaaagacttgttcagtgccaggaaaggtgtggacgaattcaacatatcactcagggaaatgaccgagatagaaaaggacggccgcgccaagatggtgcgtacccgtttcgagctcaaatcggtcatcgacgaaataaagaatttcaccggcagcaaggaacaggaaaaggccaaggtggaggaactgaaccgcaagtacggggaaagtttcggctactatcagacactttctgaatggtacgatactatcagaaagaaaagtgaggattatgtgcaatccctgtttctccagatgaaggttcagagtttagtaaaaaaagcatcagaagtcgatgataagattgcagagacagaggcgaaggatgaaagcgaatttgatacatggtgggggtatggcggaaagattgaccgtttcttttcttccgaccagtcctacaaacagaataataatggtcgctggaaaaaaaaggaggaactggaacggctgcaaaaagaatacgacggttatattggtgctgctgaaaatcttgccaaagaacgtattgaacttgataaaaaggcaggaataggcggacataccgaccccgaacagtccggtaagaatgcggaagcggaagccaaacagcggcttgccgccgagcgcaggctggcgcaggaacttgccgccctgcaggcagagaaccggaaggcagagatagaccgcatgcaagccggcaccgaaaagaaactggcacaaatcgaatatgactataacgcgaggaaagaagaaattaaccgacaggaagcagcctggaagcgggagaacaaggaagccggtctgtccaccggagataacggacttacccgggagcaacaggatgaacttgaaaaagcccgtgcctcaaatgccgagtcccggaaaaaagcggaatcggacgtgtacagggaagaggcggaagccatgcgtgactatttgaaggaatacgggacattccagcagcagaaactggccatcgctgaggaatatgcggagaaaatccgcaaggcgcagtctcagggagaaaggctgactttggagaagcagcgtgattcggctgtgcataaagtggatatggaagccctttcccaaaagatagactggggggcggcattcggggacttgaccggcctgcttgcagaccagatgaagaacctgcttggcgagcttaaacagtatgtcaagacggatgagttcaaaagttcgggagcagcagaccagcaggtcgtctacgatgccattgaacgtattcaaagcatgcttcccggcggaaacgggacattggattttgcccggttacaaacgcagatgcacgctttgggggatgccgtaacacgtgtgcaaaatgcggaactgctacaggaagcggcattcagccggttgaaggcggcgcagaccgattacaacaaagcgcttgagaacggcaaccaggcagaaatagaacgtaccgaaatcgctcttcaaatggcccaatcgtccagtgcttcagctgacgaagagtaccagaatgccacttccgaaatgaaaacacttgccggggatgtgaaaatagcctcccaggacacggttgacggattgaacatggtatccgacggattgcacggttttgcaagcggaaccttacaggggtcatttgaaggaatccagaatatgcttaccgggctgtcaaaactgaatattgggggcaaggtcggtgatgccatcagtcagatgtccgagaccctgtcaagtgccggagtcatcggacagattatatcggccattctttccatactggatttgctgaaagacggtattggcccgattatctcatcattgatagacaccatcttcaatgcgataaccggaatgctcgacaatatcctcagtggggacctgttcaaacagataggcggttcccttgtgaatggtatcggaggattgctgaatacggtgtctttcggaggtttcaacaagctgttcggcattggcggaaatgccaaggaggtacaggccgcaatagaccgccttacggaccggaacgagaaactgcagacttccatcgaagatctgaccgataccatcaaggcaagcaaggggactaaatcggtggaagcttaccgggatgcgtacaaataccagaaggagacgaatgcgaactatctgcagatagcgcaggaacaggcacgttacagcggcagccaccattcctggaactactactggggcggattcagtcaggcacagattgacaaactgagcgggcagataggccgccagtgggacgggaacctgtggagcctgagcccggaggagatgaaggcactacgcagcaacgtggatatgtggactcaaatccagaacaccggcaagggcggctacggcgggcgactgaccgagaagctggatgactatatagaccaggccggcaagctggaggagctgaccgaccagctgtatgaggggctgaccggtatttcattcgacggtatgtacagcagcttcatcgacaacctgatgaacatgaagtacggtgccaaggatgcggctgaggacatttcggaatacttcatgcgtgcgatgctgagcaataagatcggcgagctgtacagcgataagctgaagggctggtgggagaagttcggcaaggcgatggaggacaacgatctgaccgaagcggaacggaacgcgctgacggatgagtacatgcagtatgtggaagaagccatgaagctccgtgacaaacttgccgccgccacgggctacgacaaggtgcaggaggaaggcacggtgcagacgggcaagcccggcgctttcaccgccatgacgcaggagcagggcacgaagatggagggcatgttcaccggcggtctccggcattgggcaagcatggacagcggcatcgagaacgtcgcggagaagatgagcgctgccgaaggatacctggctaaaatagaggagcacaccaggctgggtaccgcctgcctgggcgagataaaggaagatatacgtacgataaaacgtgacggtataaaatttaactgatatggcagatatactgagcggtctggtgctggtaaacggcacggacatctggactgaatacggtgtattcctggtggaagaccggcgcggcggcatggagaacctgacggccatcctgaccccgagcaaggccaagaaggacacggccgtggatatacgggaggagcacggggagaaatacagcgccgtgctcaccccgaggaacgaggcgcgtgacgtgacgctgaacttcgccctgttcaaccggacaaaggcgggatggatgagacagtacttcgcctttgtgaacttcctgaaacaggggaaagacggctggctggacatcagcctcccccagttggggctgcagctgcggttgaaatatgcggactgcacgaagtttaccccgctgacctatctgtggagggagggagtgcatgcgggcaagttcaaggtgaagttccgtgaacccgtaccggtcatctgacggattaaaaagacattcaaacggcatttaaacgataaccgaacatgattacgatatacgacaggaaaggaaacaggcgggcggacatcgccgctgacgacagctcgacccagcggaaggaggtgcagggtgacaacgtgctggccctctccttcacgcaccatgcccatatagccgtcgatgtgaacgactacacggacttcatgggcgagcgttactggctgacggaacgctacacgccgaagcaggtgagtgaaggcgaatggcgctacgatctgaaactgtacggcatcgagagcctcgtcaggcgtttccttgtactggagacgacggacggcgatgccgaaccggtgttcacgctgacagctacgccgcgggagcatgtggcgctggtggtcagtgccgtcaatgccggcatgggggatgtcaccgactggaaggtcgggcaggttgacggtacggaactcatcgtcatagattacgaggggatgtactgcaatgaggcactgaaggcgattgccgaaaaagtgggcggcaaggccgaatggtgggtcgagggacagacggtgaacgtctgccgctgcgagcacggggaaagcatcacgctgggttacggcggtgggctggtttccctggaacgcgtcacgggcagcacggccgggttctacacccgcctgttcccgataggctcctcgcgcaacatcgacccggaaaagtacggcagcagccgcctgatgcttccgggcgggaagaagtttgtcgaggtgggcgttgacgagtacggcatattcgaccgctacgaacgcgatgccttcagcggtatctatcccaggcgtgtgggtacggtaagcggcgtgcgcagcaaggaggtgaaggacaaggacggtgaaccctacacggtatattatttcagtgacgcttccctggatttcgacccgaacagttatgaacttcccggagcggtcaagcgcgtatcgttccaggacggtgagcttgcagggctcggcaaggatgacggacactatttcgatgtcaatttcgacagcgacacccgtgagtttgagattgtgaccatctggccttatgatgacggcatgcagcttccgggtgacacgcttgtcccgaaggtgggcgaccgttatataatctggaatatccgcatgcccgacgagtattacccgtcggccgaaaaggagttcagcgatgccgtagacaagtacaaccgggaacactggcaggacatcggcgtctacaaggccccgactgaccatgtatgggttgaggagcacggtgcggagctgttcatcgggcggcgtgtaaggctggagagccggaagtattttccggataccggctaccgtgacagccgtatcacgaagattacccggaatgtgaacctgccctcgaagatggatctggagataagcgacgccctgagttccggaacgctcgaacagatacgggacggcataaccggggtgcagaactatatccgtgatgtcgcatcgtcccttcccgatataatcaggaccggcgaccgtacccttccgacggacaacaacctgtattcggcacgccgctgtctatatgacttcttttcccggttatatccggacacggcatacggtacgaaaaccttcatggacccggtaaggttcggcgagttcgtagacagtatgattgccggcaagggtgcagggatattccctgatggccgggcacaggtagaacggttggaagtccgcggttcactgtcagtgcttgacttgataataaaccagattcaaggaatggagtcagattactccttcaccgagattggtaagataaaatccgtggaggatttgggagagagcacctatcgtttgaaaatagagaaacgcacggacttcgacttcatgaagttccaggagaatgatgtctgcttctccatcattaacacacagcttacaggtggttccgagtattacaccagttggatgcgtattcttaccaccaatgcgcaggagaacagcataacggtcgtgctctatccggacagcgaagtgcctggaggcacgaactatccgccgttggctggttacaacgtaacccgcaggggtaacagtacgcttcctgaagagggcggcttcaacggtcgggcgcagtcgtggatgatttcttcacgagaaggtcggattatgttcttgtccaatgtctataagccgatattggaggactacaactatgcgcttacaatcggaaaactccctaacatcaaggcactcgaaaaactgccggtgacaaccgaagatgttggcatcgttgcacagacggtcattgccgagaaattctatcagttcgattataacggtgatgtcattcccagcaaggtagaccggggtatctggtcgctggaaacggcccagagcggcgctccttatcgctttgtacagcacgaactgtcgaaaccttccggcagtgaatataccctgctggaacagcatacggtctaccaccttggctgcaagtgggggtgtctgaaggacaagacaaccgacgaacctaaatggaactccccttcatggggactccttgagggcgacagcaggtattcgctccaactctccctatcaggcggggaggcattcgtcataggtggtgtggatgaggtgatttccgggcgcgttttctatggtacaattgacataacggatgatgtgatggcggacgatgctaccgaagtggagtggttccgcaatagtggcaatgttccggcagataacctctggacgcctgagtacgtggatggcaacaggcttgccattcatattgacaacgggaatcagcacggggtcggttcggatttcggttttgtcagcaagtccgtgatattcacctgccgggtgttctttccggtaaacggcaggttggaggaagtggataagaatttaggatttgacatattataactatgggaataaagagtaacaagcagtggggccgtatttacgttgcccccctttcccttcagggagagataatagtattgtcgggcagtcccgtgcagacgtatgacaagcagctgcgggaatacagccccgaccggaccctgacaccgctggtcatcgtgccgaaggtatcggcgttcgatgagaagacggtattcggtgaaatggaactcacgggggtggagtggttcgagggcgcaccccgtgacaagtcggccaaccgtatcgtcgagggcgagtattacagcatttccgacggcagcggcggtgtgcccaaatatgcgcttaccatccggaagaacattccgccggagaagccggtggagtatttcggtatcgcgatattcacggacccgcgcacgaatcgcgaggtcagggtcgaaaggagcatcaggtcgtattcgcacctgtacgacaacaaggcgtattcgttgcgcctgaagggtgattccgtgatggtgaccgacccgcttcgcctggccgaccgttccggttattgggacagggagatagaaccgcagctctatacgggcactgaacccgtggatgatgaacacgccgcatacttctgggacatcctcgaaaacggagcataccgtcctgttaagctggacgaccccggtattgtctgccatgacgggaacggagtgtacacccgtaagctgatgtatcaggcgaagtatgtcactggtgcaagtttccgttgccgcgcctgtgaatatgcgggcagcagaccgcaggcccctacggacgggcggctggaaaaggttattgaggtaaagacggagatggccgtttccttaaattgcgaaattatccagacaaagggttttaccctttccgatgatatgaagcagccgagcgcctatgaaatacgcatcttcgacaaccgccgtgaatacggtacagagtacgatgaccttttccgcatcacatggaaaggccagagtgccaagccgggcgagccggagaaggtgctggcaaccggtgggcggacgctggagttcattccggcggacaagggtttcccggcaaaatatatcttccatgtgcgggcggaagtggggcttctcatcggtgagtccctgatgggcgatgaggaaggcgccgttatatcctcgcaggttgacggacagacggtattcattgccactgggccggtatatgaataattgagtaacaactttaaactttaatcaatatgtacgtaattgtagaaaaggcaaagctcgaaggcaaattctttgggataatgaatacccttccggatggcagggtgtacattcctatcagtgagatgcggaatgtgggtactcttcttgacatcgacatcatcggttctgcacgtgagttgaaggaactgatagagaaacagcaggaagcgatgcagggttcagaggacatcgaccccggtttcagtgtgacacccgaagaggaagaggaaatagaccccggtttcagccaggagcagaatccggacagcgacagcggggcgtcggaagagggtgatggcagcgtgaccggtccggaacagccggccggggcaaagactgacggaaaaaggaaaggaggcagacgatgaaccagaatcaagtgaccgcttcactggctatcgtggcggtgagcaacggaacaaccgtcaacgggtatgtacgcgtggataacggacctcttatccaagcatggacaaagggtagtgacaagtatacaccggactttgaagcgttggcggaggacaaacgccctattgtcatcgtcgtattgcgggatgtgagcagcgggcgcatccttattccttccaaacttgtattcaagtacaacggtaccgaacttgcattcggggaggatgggctgtgcaatacggaacagtttgtcggcatgttcaagcgcgtaaccgggtataatgtaagtgtagactcgcagtcctatcccatgacgggacttcgcgtcatgaagaacctcgtgcccatctccggatatgacaatgaccgcataaccgtttccggggaagttgaaatcggcgggcatacggtcgcgttcaacgaacttgcgacggatgttgtcatccaggaatcatcgggtaaacagtatgagttattcattacttctgacaagggtacgcagataatcaatccgtccgaagtgctgacgttgaaggcatcgctgtacagcggcggagaccttatcaacgatttgggcaatatcacgttgcaatggaagaagcaactgccgtcgggagaggccaacctcggaactcagggaacccagaacattgccgcgaatgatattgacggttcgctggtggtaagttgtgaggctgtgcagaatgcgaaggtcatagcaaagggcttcattaccgtgttcgaccttagcgaccctatactggcggcattcaaggtcaaggggcttgcttctgacgggcagatatatcctggagagacgggaactcttattccgtatgcctataaacgccagtccggagaggaagtggcggtggcaagctgggacttcgccacattcgacggtgaaaacaatccgttcacgctgtcgggcaaggatagcaacaagttccagggcaaggacatcgcactgacctatacggatgcggcacgcgccaagacattcagagtaatcgcaacgaacactaatcccattgagctatgatgacaacggcggttttgagtgtcgtggcggtacgtgagcctgacccggtggaatacgttgacatcgagtgccagccggctgccatctctgtggactgtaacaatgtgcagcttacaccgctgaagctgaaagccctgcaccgcagcggggctgatgcggccctgctggatgtattctggcggctgcatgtccagtcggccggcaaggacctcggtacggcggattcccccggtgcatcgtccgaatgggaatactaccttccttctgacaaatggggcaatgcggattccgtgattgtggaagcgtaccgtgatagtgcccgcgagacccttcttgctcagaagagggccagcattgtgcgtcagaacccgtccccgttcccggtcgagggtgactggaaaccgctgccgttcaagtataagaatggggaatatttcctggataaggacaagggctttgtattcatgtggatgaatccggtggccggaaacagtgagatgcacccgttcgacgatgtggcccagaacccggacactacttcctggaaatctatccaggaatacccgctactgggtacgcagcttttgcttgccaggaagatagacgcagacctcatcgacgtggataatctgcgggtgaagcacctggatggtgcagacgggacttttacaggtgatttaaaaagtggcagtgtcaatattgccggcgggaaaacccttttgaataaggatggaagcgggaaattagccaatggagcggtaagctggacaaaggaaggtgacgtggacttttcgggaaaggtgcatttgaataaggtcactatagagaggggtgttacccctgggatttctcaaaatgggcagatatggaaagtccctgatacagcggatacctttatggaccacatggtaataaccagtgctttgtctcaagtggctttgtcttctaattacgatttttggggtggacgctctcttactatctttaatgtttctgatgggaaagtaaagatatttggtagtggtgaacctggtatatatgttcccggaaacggctgtattcatttggagtgtatttcatctacaggagcattggcaatatggggtgtattgggtattatagaaaatacttttatagcgtttccggttccataattaaaaaaaatgtatggatatgttttcaagaattaacgacaagctgctgcattttcttgcatgccttgtcatcaccctgacggtgggtgaactctgtgccgttacggcaggtgtaactaaagaagccgctgactggatgtataagaagaactgcaaggtcggtacgggctgggactggctggacatacttgcggatgctgccggcatagcggtcggcagcgtattaaggagattggtattcgattattaatgtaataaaaaggattatgttagacacattattggttgcgctggttatctcggtagataccgcgcaggtaaaggaatttccgcagaaggcggaagtcgagttcaagaaaaacgatttaaaagagaacatcattaagtcagccttgaatttccataacagcggaaagaaggacgacaagacctggaactggaagattcaggatgtggtgttcagaaaagattaaaacaatgttcaatttaaattcaaataatcatgggagctataaaaacaatgaaggaagttgaaagcgcacttccccagaaaaaagagataaattatgtacgtgctttggataagaacggcaatccgattttaatcaataaagaggacctggcgcaagttgtgggagaactgattggtatcgctacttctcagaaaaacggattgcagaagtataatttgatacctaatttctcaaatagtggcggaatatggtgcattggaacactgcccaataataacttcttatgcactttcctcatttcagtgaatcatacatctttcaaacaaagtggtgtttctttactacagataataggaaccggtgacgagaattttaaggcaaactacaaatccttaataaaagggacccaggaagccaaattttacgccaaatataacgagaaaggcattaatgtgtatgttgatgcaccagcgaatataactgtgtctatattgagctatagccacatggcaaaagacttttatttcaacttgcaaaagcaggagtcccttcctgaagggtgcacacaagcggtagatgttgatactctgtaggcaatgtaaaacagaattagtagaagggtattaaccttctactaatctattaccccaatgcaataggcacaatttttgtcaacttatctttgattgcatctaagtcttcaaactccattttttcaacgctttcaactcctgaatggtctgataaaggaataatacaaacgttcatattactatgttcatgaggttctatgtatatattcttagtatcaacatatatggaaagattattttttccgatacacacacattttcctccaagtttttgattgtaggtttgtgcagcaagaagaaaaattcctatacttgctgcactatatattgaaattaaaaatgtaggagttccatactctgaaataaggttgacttttagaactccattttcaacgcttgatggtgccatttctttatcgactaaaccgttcttgcttggggtcgcaatcggtaatagttctcccacatccataaatcgacgtgggagaactgatgccagttgtaactcctgagaaagacggattaagtaattccaagtttgcaacaacaaagataaaatcagaaggcaaacgtagcgtattactataccgttcatcatcttcccaatgggctccttttgcaatcagagtatcatgtatatccacaggtgaaccatcaagtgatttttgcgtttacattgctggtaatactatggaattacaagataccacaaaagtatatgtcaaatacctgtatggacagcccaatagcgatacatacctaaaaatgaaatacgaaagtgaccatagaatatccatatacttgacttcggataattcattaggtgatagaactattgtcagagaactgatagttagagattcaatgtatgatatggctacacaagatgatgaaattaccggactggcagattgcactattgtgcaataggttttatctccttgtatgattcgtcaatgaaactaatatctttaattatatcgcatgaggtgctacaatcgtatttaaaataaacagattgcccttgtactacagtgaatactacgtaaacatcccaattcttataaaccacttttatatcggtaaacccggatggtatggaataaaactctccgactattccatcggaaggtattttgtttgcgtaggttgccaatcgaacccctacgttgtagaaattatggcttccaatgatattgagacttactccgttccattggacttgatgggtataatggattgcaaaagagtttgtaacacgtaattttttccataacagttctcccacgtcgatttacggatgtgggagaactgctcgatggtggagctatcaaacagaagcggtctgacctcaaagatgccgaccaatatacaacgccaggaacatactttgtaaacctatggggcggagtgtggcaaaatatgccgactaacgattgttttggtctattggaagtacgttcctatgacggttatataacgcagcggctttcggccggcaacggaaaggtgtttgtccgtataaaagaaagtgaaaaaccattcaagccgtggccaactgccgcacaataacccccgttatagcttctccgttatctccgtgaagctatcgtcgatgatgtccggtgttccgaccaattggacaccgtgaggcgataaaatatacgcatgattaggtaactcgttattgaatgtaaatgatacgaataggtcacgtccttttatgtagtattttacttgaagcggcttttttaaaattctttttaaggaagccgccaaacctgtatctggtatgtatataaatgataaaaagtccatgcacgtatcagcagaatcattgcataagaccgctatcggggcacgataccagtcagtcacattgtctgcaatcttatatacagaatcgtaagcatttacaaaatgaggatataccttgaataaatccggagataacaaccccgctttttcaatagtggttgtaccaatcagttctcccacatccgtaaatcgacgtgggagaactgttcacatctttaggacttttcccgtttatgcagcgtgatataattcaaggagaaatgtcccccgatgacatacgtacaagtggaatgtatgatgtggggaattctaccactatgccattcaattacggtggattacttgtatttaatactaagactttaaccattcaaacgggtgttgatttacagggaaaaacaatttgtatacgggtaagttggaataatgggccttggtcctcatggaacaattttacattcaatcagcaaagcatttaatcaattattttggtcgggaatataacttcccggccaaaatagccaaatcatacttcaacagcatctattgcatcctgtggaaattctttaattacttcattcttaaattccagtctcgaaaagtctgatgtagataggattgaaatcaccgggtcattgctttcaatatagatattcaagcggttatcttctgttttcttatactttaatttaaggagaatcaactgatgacttttagggattaagtagtgatagcgaaccgaaatatatttatcatctacgccatacataacctgtacaacagcaagcgtattttgggctacataagtgtgccgagttgagactaagaagttgactacacactcttgacttacagtcattaataagcattttgcattcatccaaaccggaaccattttcttatcccaaagtccattcttttgaaaggtagccacaggtatcagttctcccacatcggtttgcagcttctcgtcaaaaaaagtacatttggcttaaaaatggataaaatcaaataccgcttagtttacaacagaaagaaacagctaaacaaacagggaatggcccttgtgcaagctgaagccttgcttaaccaacgaaaagtatactttaaaacgaacatttatctgaaacctgaacactgggataaacaaacttctcaagtgtgtaaccatcctcaggcgaatgacctgaacacaatgctattcgagtttattttacacttgcaagccattgagctatccctatggaagcgcggcattccggttaccttgtcattgctgaaggatgctatcagaaaagacaagccggtcaatgtcactttccccgtatttgccaaaatctatgtgcaggaatccgaccgtaaaagaagtaccaaggaaaatcttctgacaacgataaccgtacttcaggagttccgtcccggattggatttcaaagacattacttatacctttctaaaggattttgaagtgcatttgaaagagaaaggaaatagtgtcaatacagttgccaaacacatgaggcagttacgtacattagtgaatgaagccattaatcagggttatattccctctgatgcttatcctttcaggaaattcaaaataaagcaagagaaagggcggaaagaattcctgactccggatgagttgaagaggctggagaaccttgatgtggacaagaagctccgccatgtactcgatgccttcttgttctgctgctataccggactgcgcttctcagacttttgccagctatctccggccaactttatcaaggtaaacggtaagcgttggttatacttcacgtccattaagacaggagtagaacttcggcttccgctacatcttttgtttgagggtaaggcattggctgtattggaacgttacgatatagtaactgattttgctaaaatcggacccaattcagaggccaataagtatcttgcccaattagctgcccttgccaggataaggaagcacataacctatcacacggcccgtcatacttgtgcgaccctgcttgttcaccagggcgttccgattaccaccgtccaaaagctacttggtcatacttccgtcagaactacggaggtgtattcagaggttctttctaatacgattattcgggatttgaaggctgtaaaaaggaagaaaaacacacctgattttagacgcccggtagaatgtgggtagaatgtatggaagctactaatattctacttttatttttgaaaggtataacattaggaataaaatattgtacttttgtagatatagaaataattaaataaacagttgtattaaaagtgcaaagattacaaggaagtgttcaaatgttacaaggatattccgggcgtggtattcctggttgatccgccatacctttccactgaagcgggaacttataggatgtcctggcgtctggctgactatctggatgtgctaaccattctgaaagggcattcgttcgtatacttcacttcaaacaaggcctccattttagaactgtgcgactggatggaccgaaactcattcgttggcagcctgttcaaggaatgcaggaaagtggagtttagtgcaagcgtaactatcaagctaaatatacagacatgatgctgtacacgaagccggataaagtgttaggtatagcagcttaacactgcataaagatagtgaattattttgaatctgcaatggcttttaaatgatattttaaggtcgttttaagagggttcaagtgaaagaaaaacggtgggctttggtcgtgtagaataggaccgcgctcaccgtttttcttgtacgcgtcgtttttgtactttttgaaacgcatcgtttttgttaagcggcacgtctggtttttccggatttaaatttgaatttttaaattatataggatatgaaaaaaatatatatatcggtaatggcgagcttattattgttcgcatcctgttcagactatctggatgtaaattctccgtctacgtttgataaggagtatgtatttggcagtgaatccgaaataactactgctgtcaatggcatgtatgtgcctatggtcagcggtaagggttgggtaggagttctgcttaagaagatgctgtttaatacggatgtggagttcagtggattatctacagcatccaatctcaatgagcgtgcatttgttccgagtacaggcgatataaagtcgtatggtgatatttggacgggtatgtatgacggggtaaaccgtacgaacgatgtcatagagggtattgaacagagtcctctgtttgccgctgccgacaaaactaaaccgtcgcgtctgatgcattattacggagaagcgaaagtcctgcgtgccatgtattatttggagcttgtcagaaactggggtgatgtgccttacagaagaaaacctgccggaaataaggatgaattgtttatcggagcgaccgaccgcaatacaatattgaccgatatgattaatgatttgatagaggtagaacctttgatgttgtatgcagaagaatccgacagaggagtagaggctgcttcaagagaattctgtcaggcattgatagctcgcattgctttgcaaagaggtggttggagcctcaggccggattatgataatccttctgctgtgggtacgatggagcggagcgacgattggaaagaatattataaaatagctgaggaatatgccggaaaggttatctctgagggtaaacattccttgactcgttctttccgtcaggtttgggtagatgaatgtagttggatagtaccggttggtgatgataatatttttgatgtaccggctaaagtaggtggttccggagaattggcttattcctggggaacatatattgtatcgtcaaagaactcagagggcgtgaatgcgtccaatgctcctcacggatattcgtccggtggcgccagattggctcttacctatatgttgtcttttgatagagaggatttacgtagggatattacttgtgagatattccgttatgaaaattcaggaatgagttctattattcagaagccattttccgaacttaatgttggttgtggcaaatggaaccgtctatttatggaatcaccgttgggcagtacatctaataaaggtacagggatcaattatacgtatatgcgctatgccgatgtgttgttgatgtatgcggaagctgccaatgaaaaccatgacgggccgacgaccgaagctaaggatgccttgaagcaggtgcgtaaaagggcttttgcagaaaaagaccatgctgaaaaggtagaggcttatgtggatgctttggggacaaaagaagatttcttcaatgctattgttcaggaacgtgcctgggaatttggcggagaaaagcatagacgttacgatttggcacgttggaatctgtatggaaaaacattatataatttgtatttcgattggattgaattgggtaaagtagcccgtactaagcagtatgaaaatacggaaactccttttgaaaatcctacttatgatgcacgctttgattcttatccggctgtagcctattataaaatggtaccggcggataaaacgctgttcccggtatgtgtagccgaaacaatggattggtacaaagaaggggacatcaattcttatgatgaggcgctacctgcatatccttcccaaaatccttccggttactcgcgtgtagatatgtgtgttcaatattgtacgcaagttaaaaacgccagtcctcgccggtgggaaccgtctgcccgtattctgcattctttctatggctatattaatgcatcgaatgccggggctgtgaatcccgaaacggatccggtacgctatttggttcctataccgccggacgcattgtcaagccatcagggattattgaaaaattattatggatattaaaactaacagtaggatgaaaacaaaatatatagtgccgcttttacttttctgtctgtttgcttgtatagcatgtgaagacgagacgacagagatgccccgtttattcagaccttcctttattgcttcgtcctgttttgcagaaagcaatactataacgctggcttggagaacatccggcgaagcaacttcatatacggtagagctttctcaggatgccatgtttcagccggaaaatattgaaacacagacagtggagaagggcaaatgtacgtttgcgaatttacgttatgagactaaattttatgcccgtgtcagagctaataatgaatctcttgctataacatcgaattggacggaaatgggttcttccatttcaactttgtcccgtactattccgaaaatactgtatgctgtggaaggttcgcagattaatgagacttccgtggaaattaaatgggtggtatcggaaaaaaatccggttgacggattggcgatatgggaagaaggaactacagaggaaaaacaaattagtttggaagatgcttctgccggacaatatacgattacaggattaactcctcgtactacttattatgtggctttgacaaacagtgctgcaccggaaggagcagaaaaatataatcaacagagatttaccactgcaggaatgcctaccgatgcagttgtggtggaagatggagttgatttgatggataagattaaggccggtatggatgatacaagtaagcaggctcttgttttccaattgaagaatggcgttgattattacctgacaacaggcggggaagtcgctgcgaaaaccagcgatattaaattgaccaaaagcattgctcttcttgctaacccgggagaacgtcctaccttgtacattcgcgaggggggcttcattgtgaaaccggaagttggcaatatgccgaatattgaatattttattgttgataatgtgaatattaaggaaacatggactgagagtaagcctagtaaaggtagtaaaacacgtttgttgaatatagggaaacacaataccggtactgattttacaatagacagatttgaaattacaaactcggatatagttttaccatctaccgttttaatgatgagtgatgccagtgaaggagtaaccacaatcaaccatatccgtatagataattgtttggtttccggtattaatgatacaaaaaatgtaacaaaacaattcggttttattcatgctataaataaaggctctaatgtatggaatgatgtctccgtcactaattccacattctatgagttctatatttcaccgggtgtgtttggagcacctactgctgatatccctattgcggccggtaacaaagttgttatttctaattgtactttctataattggggctcaaataaggatggcaaaaacacttatagggctgttgggaatttctccaaattgactgcgccgctgaacttgtcggtaagtaattgtgtctttggcagcagtaaaagtaaagtgcttgatgcaggcagtattaatttaaattcgaaagtcaactattgtacatcggattttgaaaagatgtctgatgccggtttgacactgatttcattggatacggatgatgcttcattattccgtaatgttgaggaaaatgattttactgtagttgatgcagagtcagtcatttataaatcagaatacggtgatccccgttggattaaagttttggattaattatttgtaaatttaatactctaattaatgagatataatatgaatttgataggattcttttgccttgcatgggctttgttggcttgcggccaagatgaagggaaagataaccctggtgtttctttcccggattatggtgaggtactggcctttcccggtgcggaaggatatgggcggcatgctacaggtggcagaacgggtgaagtatatcaagtaacgactttggcagattcgggcagaggttctttacgtgatgccgtcagtaagcccaaccgtattattgtatttaaggttgcaggggtaatcaaattagagtctcctctcgacttctcaaagaacttggcaattgcagcacagacagctccgggtgacggagttgtcgtgtatggcaaccgggtttccttttcgggagcggacaatttgatatgtcgttatttacgtgtacgaatgggcatgaacggccgtgaaggtaaagatgcagtcggtatcgcctatggttcggatatgattttcgaccatatgtctgtaacttggggacgcgatgaatgtttctccatcaatggagatcctaaaaagcccgcagatcagcctcggaatatcatgatacagaactcgttcatagggcagggattgcaacctcattcttgtggtggacttatccagaccacgataaacgatggagttactttgtaccggaatctgtatatagacaataaaacccgtaatccgaaagtgaaaggactgaatcagtttgtaaacaatgtcctttataattggggaaacggcggtgcttatattatgggagatactcagcagaaatcggatgccgatattcggaataattattttatagtaggaactacagataattacgatggcaagaagttaggcgcaacggctccctttacccgatataacgagcatttcagcgcttatttgtccggtaacttttatgatgataataaggatggcttattgaatggccgtgaactgggacgtgcagactgcatgaagaagtcggttgtagcaggagaggagattataacttctcctacgttcctcgaacgtccgtccgatgtacatcccgaaataaaagaactgatgactgctcaggaagcctacgaatggattgttgccaatggcggatcttccttgcccgtacgggatgaggtggatgcctatcttatcgatgaactgacttcattggggaaaaaggggctgattatccattcggaggaagatataccgacaaagggaccgggtaatataaagtcggcggaagctcctgcagataccgacaatgatggtatgccggacgagtttgaagacaaatacggccttgataagaatgatccggcagatgccatgaaagtagcgtctaatggatatacgaatatagagaattatatatttctgattaaatagaataccgaatgatgatgaaaaagttatgtcttgtttttataagcatattgcaactgtgtaacgtgtcggcaggggcgcaaacgaatgacaaagtcaaggagatggcaatgaagatagctgatcgtattttggcgtccacgacttatgagtttgtggataagaaaagcggaaagacctatacatccttaaagaatatgcctttgaataaagcggtgaaagtcaggagtaaatatcttgattggcactacacgaacggagttactaatattgctttaatggaattgggtaataagctggataactccaaatacgaaaactacgtattgaagaatatgaatttcgtatttgatgaggacaatcaatcttatttccgtagattgtatgaggaaacgttgaagaatgaaggatggaaagcggtgaatgccttgaattggcacatgatttatcgtaataaacgtctggacgataacgggccgatgggagcaagtttgattgatttgagccggaaacatcctaatgcggcattccggaaatatattgaaagtaccaatcatcatttaatgttctccgaaccccggcttgccgatggcactattgcccgattgtggccgcacgtgaatacggtgtgggccgatgatgcttttatggctctttcctttttggtaagaatgggagagatgacaggagataataagtatttcgatgatgctgccaatcagatattgaattacacccgctatctatggtgtcccgagaagggagtctattatcactgttatcatacagacacgaagatacacggagtagctcattggtcaagagccaacggatgggtatttatggcaacggcagatttactgtcgagaatgcccgaaaatcatcctatgcgcgaagatgtcattaagaacttccggatgcagacggatggggtaatccgttatcagggcgctaacggattatggcatcagttgctcgacaaaccagattcttatgaagagataacgggaacggccatgtttgttttcggcattgccaagggagttaaagaaggatggttacattccgattatatttatgtggcatgggaaagcttgaaaggtatgctgacaaaaatcacccctgaaggtgatgttaccgctatttgtgccggtacgggaattatgccttctttatcattttattataatcgccctcaatggaaaaacgaccctatgggtgaaggacctgttttaagagcattggtcgagatgattgatgcacctgcttatacggaaattaaagcggaacagcaatatgacaagataaaatagaggttgtatctcttggttacagcaactaacgttttttattctcgtagattatatttggttgaaaccttagaattcaaaaagcaggaaaagctcatcctatctttctctgattattgattctaaggttttcttttggttgaggccaaatatcctctatgcttttcgtaaaactgtataccgaaacagttccgaaccttttttaatatttctacaaggttattacagcgatgcgctatactttatcagcgcatagccgcctactacctgcattgccattcccggcagcccgatacggaaatcctgtacggcttggaagaagctgcccaccatagcccattcgcccaaagtacctgctacctgatagaacagtacaacggccaataggataggtagagagatacggttgaaacgatgtgctgcccagccggctgctgctgccagtaatacggacttcaacagaatggcgggaagcactgccggaagaggcatcccgaacagcagtgaattgattatcggagaaaggatcgcagtcagcaatcctaccttccagccgaatttgtatgcaccgattaaggtgaagaaatagatgggcaaccatgtgataccgccttgcggtataaggtggaaaagctggggcagtgccatattgcctgcaatgaacaatgcggccattaagtaagttcttgcattgctgtaatccagcgaatagagttttacagtttttgtttccatgttcttattgtttataaaataatcttattcatttatcgggtaaattgtattggtctgtcggataatctttatcggctaatcaaacaatctgttttatactcacaaagttataactattatttcaaaccaatacggtcttgacaacagtaatgcctgattttgtcagaaattgatattcactccgcccataacggttgccttaggcatcggaaagccgtcgtttatttcgtaacgttgcgccagcaggttttcccctcgtacaaagacatcggcatagcggcatacacgataattggcacgcaggttccagagaacaaaactttctttcttctccttgcctttgcttacgttggtatagaggtcttttatatattgcaccccggttgacactccccagcggtctcgcgtaaagtcaacgcctgcatagaatttatgtccgggagcggcaatcaccggattctccatgtgcagccaactgtaattggcatttgcctgccagtgcggggtaatgcggtaaccgatattggcttcaatgccccggttttcaatcttgccggtatttacgttcttgggcttgccgtccgtaggaacggtcataatcatattgtcgccgtcaatgtagtagaggtttatgccgtaatacaaagcgccgtccaacacccgttgcgagaaagacaactcgtagctcatcaggctttccgccattaaatccggattctgtggcggaaacatgtacatctcacggatggtggggttacggaatcccttgctcaccattgctttcacttccatctgtcggggcaagtggaacgaaaggccaccttgcggaatccattccgtgcctacatgcgaatggtggtctacacggatgcccgcatccagagagagccattcgccgaggtcttgacggaagtctacatatccggcaaattcatccatttgcttgtctacacccggaacacgttcgccggtagacaccatccggttccatgattcgccgccgaagtgctgatagtcgaaacccgtggtcagacggttaccggtgaaaagcgttgcgctctgataccacgacacgcccagcatgcggtctttggagttgaagtgggattcctgcggcgtaccgccgggatgatagccgtcattgattttatggcgtccccagttatagaagaaactcaaggcgccggagctcttttcataatggttttcgagagcgagcgaagtcatgccgcgcgtgatgcgggagtcattgtctatgtacggattaccggcctcgcccggattagaggccttgaactgcgtgatgtttacatcgccccacagtttccaggaatcgttgaagtcatatcccagcttggtatagccgccgtattgctcaaactccatattgtcgcgatgcccatcggtacggttgtaagagccggtgacaacgctgctgaaacgccctttcctgatgcggttggaaacttccgtctgcaatgtgttgtaggagccgtagccgatttgcgcatgggtcttaaccccgtcttcctgcatcttgcgggttacgatattgataacgccacccatggcgttggaaccatacagcaccgaggcagggccgcgaagcacttccacccggtcggtcagcatggtctgataggcatcggcaatgggatgtcccattaatcccatatattggggatggccgtcaatcagcaccagcaaaccagccgtagggctgccgccgatgccgcgcaggttcattccgcctgctgctcccgtggacacgccgtatcccatgatgccgcggcttgtagcgaacagtccgggcacttgctctgtcagtgcgggcagtacggatggttggaaacgttgctccaacaccttgcggttcactacggagatggtcatcggcagatgccgtatatccgtttcgtttcttgttccggttactaccacttcatctatagtcaggttccgggcaatgcgcgcgctgtcctttgcagcctgcgcaaatcccgccattgtccaaaggccggctatcgaaaggagtaatatgttttttttcttcattcgtatcgctttcttcattatttgctccgccaaagatagggcgtattttctttttccgtttgtattataatctctcttgtttgagattttctacaaaccggtctatttcctgtaacttttggggtatatcgatgctttgaggacagtgcgggttgcattggtcgcatcctgtacaatggcttgcctggcggagcttcggtacgctgcggtcataaccgatgaggaaggcgcggcgggcttcgcgatagttctcatcccggctgcttttgggtatattgccctcgttgacgcagcggttgtaatgcagcagaatggcgggaatgtccagtccgtagggacaaggcatgcaatacttgcagtcgttgcacgggatgataggataggtaagcattacctgcgccgtatcttccagcagagccagttcttcttccgtgcaagggtcgaggggggaataggtgcggagattgtcctgcagatgttccatatacgtcatgccgctcagtaccgtcagtaccttggggaagctcccggcaaagcggaatgcccaggaagccacactctcttgcgggcgatgttgtttcaggcgtgccaccaagtggtcgttcagtctggatagccgtcctcccagcagcggttccatgataatggcgggaatgtcgcgtttaacgagttcgccatacagatattcggcattgacattattgcccgaagcatgccgccagtcggcatagttgagttggatttgcacgaaatcccagtgtatgcggtcgtgcatggccagtatttcatcgaacacgtccgttgttccgtgaaacgaaaaccccaggttccggatacgcccggccttgtgttcttccatcagaaaatcaatcataccgttgtcgatgtaccgtgcccggaatgtcttgatgccgccattgccgacggagtgcaacagataataatcgatgtagtccacttgcaggtcctcgaacgatttccgatacatggcaattgaattctcgcgggtgtaattggaaaagttggacagtttggtggctatcaggaacttttcacgcggatggcgtttcagtgctattcccgttgacttctccgaccaaccctgcacatacacgggcgatgtgtcgaaatagttcacgccgtgggcgatggcatagtcaatcagttcgttgaccgcttcctggtctacctcatctccgtttccgtcagcccgcttccgggtaggccagcgcatgcagccgtagcccaataaggatacccggtcgcccgtggtgggattggtacggtacaccatcttatcgataggaatttcacccaaagcggccgattcgctgtccgaacggttgttcttgccggagcagccatacagtgcggctgccgatgcaaacgtccctgcgccggcaagcttgaagaagtcccggcggtttatcttgctgttattcttattattcttttcttccatagttactcgtatttattcttctcgatgctgtctgttgtccagaacgtatcgaagattttcctttatcgttttgtcatctgattctcacaccgttctgtgcatgatatgtccttccacatagattgcgctgaacgggcgtgccggacacaggttctcacatgcgccgcagccgatgcagcgttcggtattgacaacgggtattttgggggattgcggatttccggagtccgaagccaccatttgtatggcgccgaccgggcagtggcgagcgcagttgccgcactccaccttatcggtgatgcagatgcaattctcctttatccatacggcatgacctatctggatggccgatttgtcggctttcgttatcggccggatagcacctgccggacaaacttccgaacacttggtacattcgggacggcagtagccgcgctcgtaggacatttccggctgcatcagccgtgtcaggtcggaagaggggcgcagcacctggttgggacacaccgcaacgcatagctggcaagccgtacagtgttgtgcaaagttgcgtgcgctcaacgaccccggaggagtaatggcggcggcacgtgcgggtatcttcttgtcttcgatggcggccagtccgccgtctactttcttctcttgcgcctttagagcggcggtagtggccaatactgccgttgccgagagaaatgcgcgccgggtatcatctgccggtccggtagaagttgttgtacattgagtctgattccgggcggatattttcgtagcatccgctttatgacggcggcgggtgtaggtgatggctccctgtctacatttatccaggcagtccatgcatgccacgcaacggctgtaatcaatttcgtgggttttggagttgatgcacgatgccttgcagttgcgtgcgcaaagtccgcagccgttgcacttctcggtatctatgaccggtttgaaaagagaatacccggacaggaaaccgagcaccgtacctaccggacaaatcgtgttgcagtacgtacgtccgcctcgccatgccaatatgatgagcacgacaaaagtaagggtcgcaatgatgaaggtgggcaggcttttcatccacacctccgtttcataaaaagcgtagctgtccgcccgttccgccagatatgccagcaggttattgccccactgatagacgggagcgaagagactggaagcgatgcgtccgtaagagctgtacggttcgagcagtgaggcgactgcatgaaagcgcacgcccgcaacgagggccacggcaaacactgccaacattgcgtagcgcagccatttcctggcgggagaatagcggaaacggtttttcttccgcttgcctgcaaaccgggaaatgacatcctgaaatacgccgagcgggcagataacggagcaatagacgcgtccgaacagcagggtcaatgcaacaagcagcagtaccacgcctgcattcagtgcgagcagtgcggggaggaactgtattttcgccatccagcccatccagccgtgcagcgttccggtgaaatcgaggaacaggagcgtgacgagtgcaaagaatacaattgcaagtgtcagtctgatagtacgtaacatagtcataatagttttatcattgcaaaaataaggagtttataattagtttgtgtatatggattacgtttgtttttaccgattttacagaaaaaagcttatttcttgttcaattcctgtttctttcagaaaatcccggtcgtgtgagactgcaagtacggtaccttgatagttacgtatcgtagctgtgatgatttcaatactttcgatgtccagattattggtgggctcgtccagaataaacaggtcgggagtgttatcggcaatcatcagacagcagaaggcaagacgcattttctcaccgccgcttaatttgctgcaaggcttgttccagacgtcctgcgggaaaaggtaacggtttaagatggtctttgtttcatgctccggcagatgccgcagattgaaggcttccgcttgttccgaaacggtatattcattttggataagggagtactcctgatccagataaatataggtaaagtctgcacgctctatcgttccgccggtcggtgtcagttcgccggtaatcagtttcagcagggttgttttgccgctgccgttatcacctttaatgcagaaccggttgccgctgcgtagctgaaagctgagcggaaccgtccaaaggtttgtgttgctgtccggataatgaaagttgatattctgtgccgtgacgagtattttgcctatatgcaatgccgaagcattgaagtcggttttcagcttgtttgtttgcggcagggagcctttcaggtttgttatttcctgttgaatcttgtccgttttttcggcatggacattgctgagtttgctactgctgttttcggcatgattcttcaggccgcccaacaggatacgtggaatacctttctttatggaagccttttcgcctcgtgtgttttgtctggctttccgttcttccatttcacgggcggtcttgcgggcgaggcgcaaggccttttctttttcttccaactgctgttgcagggcattgcggtgcacttccttctgttctttgtaaaagtcgtaattgccgccgtagcaagccagtccgttgcgggagagttcgcaaatggcgggtaacagatttagcagagtacggtcgtgactgataacgagcaccgtagccgaagtgcggtgtacgaaatcatacagacgtttccgcccggcagtatccaggtgattggtcggttcgtccagcagtagggtgtccggttctttcagttccatgccggcaaggaacaggcgtgttttctctccgccgctaagcccctctaacgggcgtaaaagagagataccgtccaaatgccaggcgtggagaacggcttgggtgcgctcttcgatattccagtcgtcgtcgagccgggcaaagtgttcttccgctgcatcaccgttcagaatggcatggagtgcagttagcttgcggtctatgcctaatacctgcgcaaccgtccggtcgtcatattgtccgaaatgctggggcacatagtaaagatgtccggaacaatgcacactaccggtgcccggcgatgcttctcccgcaaggatacgcatcagggtggactttccgcaaccgttattgcctgtcagcgcggtcttttctccggaattgataatcagattgaggttggaaaacaaaacttccttatcagtatgggtatagctaaggtctttaataatgatactcataaatttactgtgtttagggtagataacataggtgtctgtacgacacactttcaactcttgtaaggctgtggggaacagacaaacacagtaaaggctaaacatatcctttttgagtgatgctcagcgttctgatatgaaaagcatatataaagtgatgtttaccgaaatgtgctgtctttatttggatattctcattggtggtggtatttgttggttagcggttgcaaaggtaggtatttgttttataacatggaagacgcatcgaacgaaagcggcagcaatgcgcccacacttctcaattcataaatgcctttttcgccggacagcagtatgcgcatgggacgtttgaaacgtttttccgtttcgagcattacctgccggcaggcgccgcacgggggaatcggttcttccaggaactcgccgcgttcgttgcgggcggctatggcaagtgtctccacagcctggtcgggatattgggagttggcatagaacaaagtggtgcgttccgcgcaaagccccgacggataggctgcattctcctgattggttccggtaacgatgatattgtttgccaaccgggcggctgcgcctaccgagaagtgcgagtagggggcataactgcggtaagttgcctgccgggcggcatccaggagctcgcggtcggcggcattcaactcttcgtattcgtatatcttgatggcaatctgtatgttcaggtccttcatagaataatggtttattgtaattaatgttacaaagataggaaagagattggttttttcaattcttttgcagacttttgtgtcaaattcaacacccgaagcatgaaacctatattcagactgactgctatcatagcacttctccttatttgcgtggctgtgcaggcacaacgcagaaattcccgttacaacgaatatatcaaacaatatgccccgcttgccgtggagcagatgaaggaacataagatacccgccagcatcacactggcacaaggcctgctggagagcggtgcgggacaaagcgcactggcacgcaagagcaacaaccacttcggcataaagtgccatagcgactggcgcgggcggagagtgtaccacgacgacgatgccaaaggagagtgcttccgcgcctatcgccacccgaaggactcctacgaggatcactcgctcttcctgaaacgtggcgcacgctatgctttcctgtttaagttgaagattaccgactacaaaggctgggcgcgcggcctgaaaaaagcgggatacgccacagacccttcttatgccaaccgcctgataaccattatcgaggactacgacctgtataagtacgatagccgcggtatgagcaagcgcgaggcccgcaagtgggagaaagaactgaagaagaaaccctggcttgccaacccgcatcaggtgtatattgccaacgacattgcctacgttgtggcccgcgacggcgatactttccagttcctgggcaaagagttcgacatcagttggcgcaaactggtgaagtataacgacctgcataaagagtacaccttagaggcaggcgacatcatctatctgaaagacaagcgtaagaaagccgccaaacctcataccgtttatattgtaaaagacggcgattccatgcattccatttcgcagaagtacggcatccgtctgaagaatctgtataagatgaaccgcaaggatgcggaatatgtgcccgaagtaggggacagactgcgcctgagataacgttccggaaagattatcgtaagtgcttgatgctcataagaaagtatgtaccgggaaatacctcggcttggtacgcggagtaccaaccgttggtatctctcgtaccacagtgcggtattcgtagtaccacagtgtggtacatgccgtaccaaagagtggtatgacaagtaccaacgcgtggcatgacaaataccaaagggggaaacggacgctgaggtgaggagttttccctgttatcccctgtcgtttatatttcttccgccgtaccattgtgctttctcttccgtctgtttcttcttttcgtacagtgcagctatccgaaaatgtacagagtgtccgaaaacggacactcttctttttgccttaacgcttgttttcaatgatttatgtttttggcacggatttggcaagtataagggcgaagaatcgcaggctgtccgtttacgcaacaggacggcagcaacgtaaaacggtaaataaagacagaaaatatggatagagagattccgaaagaagttcgtaacaaagagcgtaacaagaaaatcattcgttatggcggcatgggcgctgcgggtatcgtcgttatcagtgtgctcatctcattgatgcgcacgggggtgaaggagaaggacatcgtattctcccaggtaagtacaggcacgattgaagtcagcgtaagcgcttccggcaaggtggttcctgcctttgaggagattatcaactcgcccatcaacacccgtattctggaagtatataagaaaggcggcgacagcgtggatataggcacgcccatcctgaagctggacttacagagcgccgaaaccgactacaagcagaaactcgacgaggagcagatgcgcagctacaagctgaagcagctcaagcttgagaatatgaccaagctgaacgacctggagatgaagataaaagtctccgccatgcaactgaaccgcaaaaaggtggagttgcgcaacgagcaatacctcgacagcctcggttcgggtactaccgacaaagtgcgtcaggcagagttgagttataacgtggcggagctggaatacgaacagttgaagcagcagtacgccaacgagaaggaagtgctggatgccgaatatcaggtacaggagctggacttcagcatcttcagaaaaacgcttgccgaaacgaaacgcacgctggacgatgcgcaggtccgctcgccccgcaaggcaatcctcacttacataaacaaccagatcggtgcgcaggtggcggaaggttcgcagattgccgtcatctccgatttgagccacttcaaggtagagggcgagatagccgacacgtacggcgaccgtattgccgccggcggcaaggcgatagtcaagataggcagcgagaagctggaaggtacggtgagcagcgtcactccgttgtccaagaatggtgttatttccttcaccgtacagttgaatgaggacaacaaccgccgtctgcgctccggcctgaagacggacgtatatgtgatgaacgctgtgaaagaggacgtgatgcgcatagccaacgcctcttactacgtgggtcgcggggagtacgaactgtttgtacgcaattccgacaaggagattgtgaaacgcaaagtgcagttgggcgattccaactttgagtttgtggaagttattggcggcttgcaaccgggcgatgaggtggtggtgagcgacatgagccaatataagaacaagaataagctgaaactgaaataacaattaaatacctatcattatgattaagttaactggcatcaacaagatttatcgtaccaacgagattgaaaccgtagcgttggagaatgtgaacctcgaagtgaacaagggggaattcctcagtatcatgggaccttccggttgcggtaaatctactttgctgaatattatgggtttgctagatgcgcctaccggtggcacgattgaaatagccggtaccaaggtggacggcatgaaggacaaggaactggcggctttccgtaaccggaagctgggctttgtgttccagtctttccatttgattaactcgctgaatgtgctggacaacgtggagctgcctttgctgtacagaaaggtatcgtccaaagaacgtcgccgcctggcagaggaagtgttgcagaaagtaggcctgagccaccgcatgcgccacatgcctacacagctctccggcggtcagtgccagcgtgttgccatcgcacgcgccattatcggcaatccggagataatcctcgccgatgagcctaccggtaacctggactccaaaatgggagcggaagtgatggagctgctgcatcgactgaacaaggaagacgggcgcaccatcgtaatggtaacccacaatgaagagcaagccagacagacctcaaggacaatccgcttcttcgacggccgtcaagtagaataacccccataatccataacttataactcataactcaaaaatgcagaccattcgccaagcttttatacttttacggcagaacccgttgctgagtaccatattcatattaggtacggcatttgccattaccatgattatggcgattgtgattacctggcagatgaaatatgccgacatcgagccggaagtgaaccgtaaccgctctctctacataagcaagatgcatttgcagggcaaggagaacaagaactggaataattatacagcctgttcgccggctttcatgaagaactgtgtgcagccgttgcccgaagtagaggcctgtacggcatttgttccggcaacggtcgccctggtttccatgcccgacggcactaatgcggtgaaagtggatgctatggaaaccgacccgggattctggaaagtgttccggatgcagtttgtcgcaggacggggattcgatgattccgaccggggcggtgatgtgtccgccattgtcgtggctgcttctgtggcgcggaaactgttcggcactacggatgcagtaggcaagacggtgctgctgaaccgtaacgaagcgcgtatctgcggggtggtaaaggatgtttcggtcattgcgaaggatgcttatgcgcaagtgtggcgcatgtatcccgccaagttgcaggatgccacttccatctggagttatgcccaatcgcatacggtggtggcgctggcacgttcttccgaagatattccggccatcaggcagggaatagcgaagcgggtgaaggacatcaatgccgtacaggccgaaacgctgatggacattatggaacagcccgatgaaatcgtggcgcatgtcaaccatgtgtgggccaacgtggggccggatttgcggatgttgtacatacagtacgctctggcattgctcattgttcttttagtgccgtcgctcaatctgtgcggcctgagcaacagccgtatgcagcagcgcatcagcgaactgggcgtgcgtaaggcattcggagcgacgcgcggcgtactcataaggcagatcttgaatgaaaacctcgtactgactctgattggcggagcggtggggctggtgttcagctatctggccgtgtacggcatgcgtacgtggctgttcaccaataatcagaacaccggcacttccggcgagttcgacctgagcatgtcggtactgttcagccctacggtgttctgtctggcattccttttctgtctggtcatcaacctgctgagcgcaggcctgcctacatggcttgccgcacggcacacaattgtggattctttgaacgataaataaagcgagattgattatgaaattcatagtacataacttacgtatgattcgggcgcgtctccgcagtaacggatgggtgcttgcagaattgtttctggtatttatcgtgatgtggtttctctgcgattcgctgggatgcctgaagtatacgttctatcgcccgttgggctataacatagaccatgtgtaccagctttcaatgattaagggcggtgaaagccgggacagcagcatgacgagtgcggacaaatacctgggcatcctgcagaagctcgaaagggagcctgcggttgaagtggccgccctgtcgtattggagcctgccgatgagtggcaataattcctataactcgctggctgtgcaggataccatcggctgtgcagtgcgcataataaacgctaccgggggatatacgcgggtattccgcatgaaggaagatgccaaacgtccgtttgcggcaatgcctgtgaggggtgatggcacatccggcaattatgtgatgttgagcgagggtgcggccgactattataaggaaagagtacccggcttctctttggatactcccttgagctggtacggagattccgcgaacgtggtaacacagtgcggcatgatcggcagtttccgttcctatcgctatggggcagatgcagagtgggctttccggagaattgacgagaatgtgatacggaccgaattgcgggatgatggagcgcagattgttttccgcgtgaaggaaaacatggactctcccgattaccggagcaagtttctgaaagagatagccccgcatctggacaccgacaatatgttcatagccgacgttgtgccttatacggagcagcaatatcagtttgaagtgatgaaaggcgatgtggataaggtgaatacgcaaacggttgtggtggtattcctgttggtgaatgtgttcctggggctgataggcactttctggttccgcacccgtaggcgccgcaatgaaatagctttgcggcttgccatgggcagcacgaagaagcagatattctgcctgctcatgggggagggattgctgttgctgactcttgttacgctgcccgccatgattgtctgttataacgtgggcattgccgaatttacaatgggacatacggaactgattaccacctggccggtgaaatggagcttcctgcgttttctgctgggctcgttgggtgcatggctgctgatagcgctgatggtggtgattggaatatggttcccggcacggcaggctatcaagatacagccggcagaggcgttgcacgaagaatagaatgtgaaacaaaataaaaaagaagaaatatgagaactgatatagcgggtgttatcattgcattggtattggcctttgcaggtatgctaagtgtttgtgcacaagatgcaaaagtaagtgaagtacgtaaggtggatgctttctcgtccattgagataacctctgtggggacaattcattttacacagagtgatacttattctttcaggattgaaggcagggagaggtacgtgaagaatacgcagaccacagtgaaggacggccgtctgctgataggtttcaaggacgggaaaaacaagcgcaggagcaatcagaaggatggcgtgactatctggatttcggctcccgacttgaaggaggtggagtttaccggtgtaggcgaattcaaatgtgagaagcccttgaagctcgatgccgtgtcattcgagataaaaggtgtgggtgaagtgaatgtctccgacttgacgtgcaacgagctgaaagttgccttgcgcggagtagtcagcgccgatattcatgtaacctgcgactatttgtccgccaaaatgggtggtgtgggcagtgtcactttgagcggaagcgccggacgcgctgatatttccaaaggaggcataggaggcgtaaatacagataatttaaaaataggccgttgagatgataaagcaatatttcatacaagcatgggcgcaacttcgccagcaaccgctgattagtgcggtcagtatagccggtactgcgcttgccatcttcctcattatgctggtggtgatgatgcagcaggtaaaggttgtcccttttgcacccgaaagtaaccgtgaccgcttcctgcacgtcaagtggatgagtatctccaactcaaattggggagacggcacaagtaacggaccgatgagcgcacagactgcccgcgaatgtttccagttgttgaagacaccggaagccgttactatttatactgtttttcctatatccactcctgtatctctgccgggcagtccggcgatcagtgtggacttgcgacaaacggacgacatcttttggcgcgtatttgacttctcctttattggtggaaagccttatgataaagcaacattcgatgcaggtcaaccggtggctgtacttacggagagtgtggtgcgcagccttttcggcacgacggatgccgtggggcgcgagtttcttctcaatcatgcgccttaccgcgttgccggtgtcgtgaaagatgtgtctacgctggccgactgcgcttacggacaggtatgggtcccgtatacttctacgggaatggataaggaggcttggaacgaccggcacatgggaatgatgagttgtacgatgctggcgcgcagccgggatgatttccccgctatacgccaggaagcggaacgccgtaaatcagagtataatacgcttatcggagagaacggctggaagctgatttaccgtaaccgcccttacgaccaggaaaagaatgccattgctttcggcgccaatatcgaaccggatgtgaatgcggcgcgccgtcagcggattatcatcttcgtcattctgctgatagtgcctgccatcaatctttcgagcatgacacagagccgcttgcgtcagcgggtatcggaaatcggagtgcgccgtgctttcggcagtacacggatggagctgattgggcagattgtggcggagaatctggtaatgactttattggcgggtgttgtcggtttgctgttgagcgtggcctttgcatacgtgggcaacacgttgctttttgcgcaggaattcagtcagactttgaacccgccggaagtggatgcttccattctgcttcatgcttccacctttgggtgggcgttgctgttctgctttgtgctgaatctgatgagcagcggtttcccggcatggaaggcttcccgcatcgggatagtgaacgcattgggaggacggttgcattaaacgcttgtcgctaactattaattacggaaagaaatgactaagaaacttttggtacagataaagaatgaatggcgcaataacctgtggctggcgttggaattgctggttgtaagtgttgtgatgtggtttgtggtggactatctttatacgcgtatggcaacttatctggagccgcggggcttcgacatcagccattgctaccttatcgaaatgggaaagcttaccgataagagtcccgattatatcccgaaccagaccgatgagcaggaagatgccgatattcttgaacttgtggaccgtctgtgccgtcgtccggagatagaggcggtgagtctttcgcaaaactcatatccatataatggcagtaactccacagatctggtgcagtacgatacgctggtctccggtaattggacgatacgccgtttggtgactcccgattttgtgcgtgtgttccgttatcagggcacacgtggcgagacgcccgagcagcttgccgggatgttggaaaagggagagttccttgcttccgacaacctttaccggaagtacggccatccgctgacggagttcgtaggcaagagcttccggcttttcggcgacacaatacaaacctaccggctgggagcggccttgaaggatgtacgttacaatgatttcgagcaggcccgcgattcgtatacctttctttataaactcgattggtatgatacgggattggaactctgtgtccgtgtccgcgaaaatcaggaccatgatttcatccaacgcctgaaaacggacagtgagaaacagttccgcatcggcaatatctttatctccgaaatacgttcctttaaggacatccgccgtaatttccagcagacatggagcaatgacctgcgcaattacgtaatgggtatgggatttctgttgctgaatatatttttgggactgctcggcactttctggttccgtacccagcaacgccgttcggagattgccctgcataaggtgcatggagcatcggacatgagtattttcacccgtctgataagcgaggggctgcttttgctgttgcttgtcacgcctgttgctttgctcatagactataatctggcaagcatggaactgaactcctggcgcaacggtacgaccttggagtgggagcgcctattgctttgcgctgccatcagcttcctgctgataggattgatgattgcgattggtataggcattccggcacgcagggcgatgaaggtacaaccggcagaggctttgcatgatgaatgattttaggaagttaaacagataacggaatatgatacgtctttactttcagcaagcgctatatcacttgcgcgagaatcccatcataacatgggtttccgtactgggtacggcattggccatctgtatgattatggtacttgtcatcacttttcaggtgcggctcgtggactgcgagcctgaggtgaatcgcagccgttcgctgtatgtgtctgccatgtccgtcaagaacaagggcgggagcgacggcgattcatccaacgcccgcatgtcggtgcgtacggggcgcgagtgctttaagaatctcactacggcggaggcagtaacgttggtttccttgcccgaaaaggtacgtgtgtccctgccggcaggcaacaaggtcacggccgacatggtgcagacggacgacgccttttggcatatcttccggttccgctttctcagcggcaaggcgtttaccaaggccgacagcgatgccggagtgccatgcgccgtgttgagcgctgcggtggcgcgccgcctgttcggcacaacggacattgcgggaaagacggtacagttgaactatgtggaataccgtatatccggtgtggtgacggatgtgtccgtactggccacttccgcctatgcgcaggtgtgggttccctatacgtccacagacattgcccggctgacgtggtgggaggagaccatggggcagatgagggcggttatccttgcgcgctccgcagccgatttcccggctatccgtgaggaggcggagcaactccgccgtaagtataacgacagtctgcgtgactcggaagtgttctatcgcgggcaacccgatgaacagtttgccaacctttaccgcaagtggagcgaaacgcccgataccaaagccattatcctgcgctatatgctcgttatcgccatcctgttgcttgtgcctgccatcaacctgagcagcatgacgctctcccgtatgcgcagacgtatggcggagataggtgtgcgcaaggctttcggggctacgggtggcgaactgatacgccagatattctttgagaacctgttgctgacattgtttgccggcgtgttgggacttgcgctgagttacgccgccaccttcctgctgaacggtttccttttcaacaacagcaccaatgcctacctcagcggggaaaccgccctgacaccgggcatgctgctttcgccctgggcattccttgcagctttcggtttctgtttgctgatgaacatcctttcggcaggcataccggcatggagggcttcgagaatgaatataacggatgcgatcaatcaaaggtaaacgatggttatgaaaacgatattgaaacaaataaagaacgagtggaacagcaatctttttctctttgtggagctgctgctggtctttgtcgtgctgtggtatattgtggactggacgcttgtcaccgcacgggtctatcacgctccgatgggattcgatacggagcactgctacaacatcaccgtaagcaagctgggagaggactcgcctctttataatccggagctgaccgctgatgatgatatggacgacttgctccggcttacggacaggctgcgccactgccccggcgtagaggccgttgccatttcgcaaaactgctttccgtacaatgagggcagtaacggtattgatttgggtattgactctgtggctgtcaatgttcgtcttctttgggtggaggcggactttttccgcgtgttccgttatgcctttacggaggaagcggagtttgccaaggtagaggctgcattccgcaatgacgagccggtggtatcttccaatctcaccgaaggacatccggaattgggaggcagtgcgtccttgccggggcgggaagtcttgctgttgaactacggtaaggacgttcgccgtcgcatcggtgcggtgggcacgcccgtgcgttggtcgcatttccatactccgtcgcagtggggcggggcttttgcagcccttccgctcaatgcgaagaggttacggaatttcggcgatccccgttatgtcacagtcagcctgcgcgtttccgaagatgccgataagaactttgccgaaaagctgatgaatgatgccgaccgcctttatcaggtaggtaatctgtatctgctggacattacacctttcagccatttgcgcgaaatctgtgagctggaagacatgaacgaatggaagacgcagctttgcgtgctcggtttcctgctgttgaatatcttcttgggcgttatcggcacattctggttccgtacgcagcaacgccgtaaagaggttgcgctgcggatggcgctgggcagttcgcgccgggggattttctcctgtctcatgtacgaaggggtgttgctgcttacgctggcggccgtaccggcggctgtcatcgctttcaacatcggttatgccgaactggtggatgtgggcaagatgcctttcgatgccggacgctttctgccggctcttgccttgacatggctgcttatggcgctgatgattgttgccggaatctggtatcctgcttatggagcgatgaaagtacacccggcagaagcattgcatgatgaataaagttttttaagaaaagatgtatattctcgatataagcttgtatatttgcgtagttataaagaagtttacgcagacaaatcaaaacaaacggaatgggaaaacactttttcttaacatgttcattagctttcttatgcatgatatcggggacgctttcggctgcggaaaccaattataatgtacttttcatacaatcatacacaaacagttcttcctggcataataaccttattgccggtttgcaggacggcttggaagagggcggtgtaaaagcaaacgtggttatagagtatctgaatgccgatttttggacgtttgcttcggagtgtgtcatcatgcgccgcatatgcgaacgtgccagacagcggaaaacggatttgattgtgacgtccagtgatgaggctttctttaccttgactcactgcggcgattctttgccgtatcagataccggtagttgtttcgggcattaaatatcctgacaggaagttgttcgaccgtatgccgaatgtctcgggcttcacttcagtaacggattttaatgtgttgcttgaggaagccatacgtttgtttcctgcacgtaaggagattgtctgcctgtcggacagcagttttttgagtgctaagggagtggaagcggtagaagaagcctgggagtcttttcataagaaacatcccgaatacagttttaaggaactgaatgtgcagagaaagtccctcaactctctcataacgtctatttgttacgattatcatgcccataagtacattgttatcgcccctaagtggattccttttctttccctgaaattgaaagctcctgtatttgccaatcaaaacctggcaatgacaagtggtgttttatgtgtttatgatgtagaaccggcggcagatacttatgctgcgggcatacaggcggcaagtattctgaaggggcggtcgcctgcttcattcggaataggagacctgggtggcaagttattgttcgactacaaacagttggacttcttccatgtagatgtggatagtgttgaaaaacggggaatcgttttgaacattcctctgatggaccgctatcaggcctggtttattctgttctattcggtgatagtgggtgcgttggcatttcttgtagtctggctctatcggagcaaccggcgtgaatcgcgcaagcggatacatgcgcagacccgtctgctgatacaacaccgtctggtggaacagcgggatgaattcgataagatattctgttctattcgcgacggactggttacgtatgatatggatttgagaatccattttgtgaaccgggctttagtggagatgctgggattacctgcagaaatgtatacgacacgtccgtacgaaggacaggttgccggttccattctccatatttacatgaatggcgagaacatcctgcaggctctgttgaaacaggtgatacaggataggaagcctgtcattataccggaaaaggcattcatgcaagagaataccaaaggtatttatttccctgtttcgggcgaggtggttcctatctttgcgaaagacaaactgacgggtatggcaattgtctgccgtaatatatccgaagaagagatgcagaagcgttttttcaatatggctattgaggaaagttccatttatccgtggcagtacaacacacggttgaaatgcttccattttcccgacggactgctgcaacgtttcaattgctacgacaatacggactatatctcgagggaagaactggatcggattgtccatccggaagacctttcccgcacatgcaggcatttcgacaatatcatgctggggcatgagccgaactcgcgcatgagtttccggctgcaaaacgcagatggcggatatgagtggtgggagttccggagtaccgcttatgaggggcttacggtagatataccttatagggtattgggtgtatgccagagtatccagcgttataaagacaccgaagaggaacttatcgcggcccgtgaccgtgccttgcaggctgacagactgaaatcggcgttccttgccaacatgagccatgagatacgtactccgttgaatgcgatagtcggtttctccgatttgttgaaagacctgcaagccttttcttcggaagaagtacagcagtttgtcgagactatcaatataaactgcacgttgttgctggctctgattaatgatattctggacctctcgcgcatcgaatcgggcacaatggattttcagttctcttcttacaatcttacgtttatcatgcaggaagtttacgactcccagaggctgagcatgccgcagggagtggaattatgcaccgattttccggaaggggccgacaagtatatcactaccgatgccgtacgcttgaagcaggttttgaataatctgattaacaatgccaagaagtttaccgtgcaagggagcatcactttaggatatagagtggatgaatccggatataccaccgtctttgtggaagataccggagcgggtatatccgatgaagaccagaagcatatcttcgagcgtttctataaggcggacagctttacgcaaggggccggtttagggttgagtatctgccagacaattgtggaacgtatacacggaaccattacggtgacttcaaagccgggcagaggaacccgctttgaagtccgcatgagtgatgatgtaatatgattgccggtcggttttagagtttattctatccttttgcatccgttggattgcaggaactcgtcgagcatcagttcgtagttgccatgcagcatgatgtgatggttgcccaacggatttctcaggaaatattccgccggggcgttcatcttgatacgtacctgtgtgcggcacatattgatgtagttggtgttttcggtcagtgtacctgtgccgaggtaatattcgtccagacattctccgccgcatttcacgattgttacgtctccggtaggcagtattccctgtatgccgatgccgctttccgtttcaaagtggttgcggatgatgaactgctctgtctgtgcgatgccgatggtgcaatgcgccagtatgatttcgttggtgcgtgcattaatcatggaaggattggccatgaaagcaggtttgcctgtaagcactttggcagcgagcatggtgaagacggactgcaaatcgccttcgcatccggcaatgatgccctcgtcattcagcagggaaagcgccaggcagccggtagtgcccgtctgttctatcaggcggaaacaactcagggtgagtgcgcttaaacggtcttcgtccacaatcttccggatggcgcggtacaggcgcattgcctttatcatatcttcgggcgacgcttcccggcaggcaagcgcttttccggcaaggccggcacatgcttcgcctacttcatcatccgtgatttggttgtaatattcgtacacgcgttccagtgcgatgtctgtgtattccactccccagcgtcgtttggcaagcagataatccacgttgctggcaatgagccagctcgacggagtgcctatcacgccgatacgcattccgtagaggccgcgttgtgccatgaaattgctgtgcagtacaaaaatgcgtttgataatttcggacagttcgccatgcaggatttcgcttttcattccccggctgcgcagccaggaagatatttcgagggcggcggcaagcgagttctgcataccgtctgccaggatgatggcagggcggggaagagcctcgaaatgctggataaccagccgttccactccgccggtggcgatgaacaggatgctgaaatcgtcgggagacagtttgttgatatcttggtaatctatgaaattgacggtgaaatatttttccagttcgttcaggattatttcatgggaactgcggactgatgcttgcttatgtagcagtgaagcaaaagttattaggttgatgaccatagcgttacttactattttaaaagttggtttaagataaaacggttgtggttgctcatttgtttactatttcaaaggtacaagattctttttaaatagcatagtgtttttaatatagataaggtttttaaagtttttatgtctttgcttccctttggtatcaaataaatcactacatttgcaacttaaatgataaaatgatataaaaactcatgccaacaatttctattcgcgggatggagatgcccgcatctcctatcagaaagctggctcccttggcagatgcagccaagcaacggggcatccatgtattccacctcaatatcggacagcccgacctgcctacgccgcaagtcgcgattgacgccatccgtaatattgaccgtaaggtattggagtacagtcccagtgccggttatcgcagctatcgcgagaagttggtggggtattacgataagtacaacatcaagctcactgcggatgacataatcattacatccggcggttcggaagcggtgctgttctctttcatggcatgcctcaatccgggtgacgagattatcgtgcccgaaccggcttatgccaattacatggcatttgccatctctgccggagccaggatacgtacgattgcaacgaccatcgaagagggattctcgctgcctaaggtggagaagttcgaggagctgataaacgaacgtacgcgtgccatcctgatttgtaaccccaacaaccctaccggctacctttatacccgccgtgaaatgaatcaaatacgcgaccttgtgaagaagtacgacctcttcctcttctccgacgaggtgtatcgcgagttcatctatacgggttctccatacatctccgcctgccatctggaaggcatcgagaacaatgtagtcctgattgattccgtttccaagcgttattccgaatgcggtatccgtataggtgcgctgataacgaagaacaaagagatacgcgatgccgttatgaagttctgccaggcgcgtttgagtccaccgttgataggtcagattgccgccgaagcgtctttggatgccggtgaagactatctgcgcgatacctacgacgagtatgtagaacgccgtaaatgcctgattgacggtctgaaccgtatccccggcgtatattcgcccattccgatgggagcgttctataccgtggccaagctgcccgtagacgattcggacaagttctgcgcatggtgtctttccgaattccagtacgaagggcagaccgttttcatggctccggcttccggcttttataccactccgggttccggccgcaacgaagtgcgcatcgcttacgtcttgaagaaggaagatttaatccgtgcactgtttgtgctttccaaagcgctcgaagcttatccgggacgtacggaatagaagatatataatactactgatgaatttatcccgtttcatagcgctgcgtatttaccgcagttccgatgtcggaaagcaagtttcccgtcctgccgtgctgatagcaactatcggtgttgctatcgggttggcggtgatgattattgccgtgtcggtgataatcggtttcaagagcgaggtacgcgataagataatcggtttcggctcgcatatccagattagcaattcggatgcggcgcgttcttttgaaacccgccccatagccgtgacggacagtatgcttgctgctcttgcggataattccggtgtgaaacacgtgcaacgctattccaccaagccgggtatgataaagacgtccgatgcctttcaaggcatggtattgaaaggtatagggccggagtatggcagttccttcttccgccgtcacctgatagagggagagtttccgcagttcagcgactcggcttctaccaaccgggtggtcgtttcaaaggcgatagccgacaaactgaagctgaagctcggcgacaagatagacacctactacatacaggacgatgtgcgtgcccgccgcctgacaatcgtcggcatttaccagaccaacttttccgaatacgacaacctgttcctgcttacagacctgtgcctggtgaaccgtctgaacaagtggcatcccgaccaggtgagcggagtggagctggagctgtacgactacgataaactggaagaaaccacctaccggatagccgatgaagtggcccggcatcccgacccttacggggcagaatactgtgtactcaacgtagagcagttgaacccgcagatttttgcatggctcggcatcttggatgtcaatatatgggttatccttatcctgatgattggcgttgccgggtttaccatggtttcgggactgctgataatcatcatagagcgcacctccatgattggcgttctgaaatctttgggagcgaacaacctcactatccgcaaactgtttctttggctggcggtattcctcatcggaaaaggaatgctgtggggcaatgtaataggattggctttctattttatccagaagtggttcggcttgttccgtctcgacccggaaacctattatatggacaccgttcccgtatctttcaatctttggcttttcttgttgctgaatgtcggcacgctgctggcttcaatcgctatgctgttaggaccgtcctacctcattacacggattcatccggcaaattccatgcgctacgagtagggtaatttctcatttattttctcaggaattcgcttttctttctaaacagacagtagagcttccagcggagagattgcagcggctggagtacatcgaacacgggcagcgaccagtagtatctgcgccggtcgttcaaatccttggcagtcttgttgacgatgatggcttgcaggataaaccggagtatccagacgaggaatgcaatgcctgccgccagccagtggaaatgcagtatggctgttgtgagcgtagccatccatgcggcatggaacgcgaggcgggtagtggtttccagtccggcaagccagcgttgcatgccgtgatagaggcgggcggtagatgcgtaaccgattttctcttcccgccagtcttttgcgcggaatacgggttgcatgcgtacggtggcatccgcatcggtttccacgcgggtattttcggcagtggctacatgattgacgaacaggtcgtcatcgccgcgctgaaggttgagatgtgcagagaaccctttgtgttcgtaaaacaactccttgcggtaggcaaggttacgcccgatgcccatatacgggcttccggcaagcgcaaagccgaggtagcgcatggaagtgaacagattgtcgaaagctacgcgcttgtgcagccagcctttaccgcgttcatagccgctatatcccaagacaacttgcgtacgcgaggtgaagttgcgtgccagcagccgcagccattggttgctttgcgggcagcagttggcttcggtgaagacgagccagtcgtatttgctggctttcacgccgagggtggcggcaagcttcttccggctgatgtagcgggaagagtcggggacaaaactgtggtagaggtgcgggtatttctcttccagcaaggtgaggtaatcttcgctttcgtccgtgtttccgtcattgatgacgataacctcaaattgcggataatcctgctccagcacagctttcaggttacgccgcaggttttcgcattcttcacgtgcgcagatgatgaccgacaccggcgggagctcctgcgagaagtgtacattgccgcgcttcacggcacggctgcgcaggtggatgcggttgtacaggcaaaggtaataaagggcttgaatgataaaaagagttcccgtcgctgcgagtaatatctgctcggttgtatcgaatgtaaatgcttccatgtgtcctatgacgttttataacgtgcaaaggtacgaaattcgtcacagattacatggtctgatgcagattatttatttccggcacaacctcaaacttcgttccggggaaatgcctggaaagatactcccgtatgtattgcatcgtatcgttctgtatggtcttgtcctctaccgtgggataaaggttgtacaatacggtgtcgagtgtgattccccggtgcccgatggcttcaaggcttagcagggtgtgattgatactgcccagcttgccggatgtcacgaagataaggggatagttcttatcggcaatgtagtctatggtgagatattctccggtcaggggaaccatcagtccgccggctccttccacgagtacggtgtcgtagcggcgggcaagctcctgtgtggcgttctctattttgtcgaagtcgataggacggttgtcgatgcgtgccgcaagatggggagagcagggataggagaagatttcgggcattgtaagcccctcgttatcctcaggcagatagccggtgcccatgatgcggcggtgcaggtcgatgtcctcggagtgtccggtattgccggtttgaatgaatttctgggtgatgacgcgctgtccgttccgggatagctgcttggcataccaggcagtgcaatagctttttccggcatccgtatcaatgccgctgatgaaataaatatttggtttcataattctttatatctttatgtaaattaactgattaaacatcggtgctcatacctcttatcacctatgtgtttaccgtattcctcatcctttattttaaaatctcttatacctcatacttcataccttatactttacatttcgtaccttatgcttcgtattttgtacttcatcccttatgcttcttactttgtccttcctctttttctcgctattacataaatcgggtgataagtcagcgaaacactacggtcgtccttgccgtacatccggatatattcctcgcagaaactttgcaggcgtccgcgcgtccagactctcttttccgtcccggtaacgccggtttgtctgaggtgttgcaacacttcgagcggagtgtcgaatggcagggagacaatctcttcttcggcataaagaacctcgaagcgggaagacagcaaggcttttagttcttcgagcgagaagtactccagtccgtgtccggtcagggtatgtatctcctgcatattcctcttgccgaaagtgctgaatgcgagaatgccaccgtccgataggaagtggtggcagcgggtgaagaaccgttccgtatcggcaaaccattgcagggtggagcaggacgttatcaggtctgtcccttgcgggaaatcaagagtttccgcatcacacggcaaaaagctgacggcaggggatataagcgggtttccgtaaagtggcactttagctttctcaagtggcactttagcgccgtagagttctactttatcatcgtaaagtagaggtttatgaggcagaggttcaccggccggcaacaaatcgcagatacactccctcatttcgggacacaagtcgttgagcagcagagtttccggttgcaatgcgtgcagcagcaaacgggagtagcacccggttccgcatccgaactctacgatatggcggaagggggaggcgttgcctgacaaacttcgcgtattgccctcgccgttgtgtgccgcagcagacgggcaggcatgtttcgtgagcaggcgcagcattttctccgccacctgctgctgcacaagagcttctcggccgtacgtattccgtgcatgggcaaagcgtcttgcaacgagggctttgtcgatggattgaatggtactgcaaatcattttctgtttcgtttcattcaatatttatggttttgacatgatatctgaattcactggcagtcatctcccacatatcttgcagcagaaagcggaacatggactcgtcatagtgtgcgttgtccgtcaggaccggatggcagtctatcaggtcgcaaaagttcatctccatgttttcgggcgggaaaatccggtcgttcttgccgatgaaggcgtagttgtattcgtagttatacttttcgatgtttgcctcatacttatcttccttttcctcgtcgtaacttttgttattagcgtctccgaacatatcgaagtaccgctccagaatgagcctcagttcttcctttatttcgtcgaagtcccgtcggggagtcacttccatgaatgccttgtaggcgttgctgtccttgcacatgcggcgcaggaacttctggagcgttgcgggggtaagcccgttgagagtagcctgaaaggtgttcacggggataccttccagattgtcgatggggtatgtagttccgttgaacgccaggctgaacaccttgtcccgggagacttggctcagtatgagagagcccatccacacacccatggaccaggctaccacgtttacttgccggtaacggtcgaagatggaatagtcgaagtccagcgtgcggtagtcgtagcaaatcatgtagtccatgtctttgggacggtactgcttgaagggagtttcgtccgctgcccaaccggcaaagaaaaggagtaactggggatggttctcgttgataatgtacacttgtttcattgttcttttttgttagatgaagatgcccttctgtatgaagatgcatttcggttaatattccaatgccgtctgttacgggcattgcttaaagtattttcgggttatttcaagttctccgttcttttcttcagttcttctatttcctcttgtctgatatcggctgtcagcgaaaaacggatgcgcgacgttccttccggcactgtaggcgggcgcacgggcagggcgtaaaagccatgccgttgcaaggtctctgctttcagcacggtatccgcactctgcccgataatcatcgggacgatgtggctggcgccggggcaggtgtatccttgtgcctgcagggcttcgcgaagcgtccggctgatgtgtgccagatgctcgcgccgttcccgcatgtctgccagccggcgcacgacaaacagtgtccaagcgatgtttacggggggcagtccggtggtgaagataagtgtgcgcatgcggttgacgaggtattcccgtatcaccttccggcatacgatgtaagcgcctgcggatgctgccgccttgccgaacgtgccgacaaggaagtcgatgtctccggtgcagccggactcctcggcgcaaccgagtccctgcctgccgcgcacgccgaaagcgtgggcctcgtccacgtagagcagcacattgccgtaccggcgtttcagttctgtcagggcgggcaggtcggcttggtcgccgtccatgctgaagatgctttcggtgacgatgatgatttggcgaaaggcggagtggtgctctttgagcagccgttccagttgtgccaaatcgttgtggcggtaacggatgcatttggcggcagacaggcggatgccgtcaatcaggctggcatggacgagcttgtcggcaagtatcagcgtctgtgcatcgcttacggcgggcaggatgcccgtgttggcatgatacccgctgttgaacaccagtgcggcttccgtgccgaaaaggtgtgccagttcggcttccagctcttcgtaaacggtgaagttgcccgtcagcaaccgggaagaagaagaggtgggcaggaacgtgtcgggggtgagtgtgcgcaggaattcctcgcgcaaggcccggtcggatgccagccctaggtagtcgttggacgagaggttcagcatgcgtttgccgttcacgatgacatccctgccgtcgtgtaccatccggggcaggcggcgcaggttgctgtgctcttcaagaagttgcagctcttgctgcatgtgcgatatagtgctcattggctatgtttgtttttgaaatataaggaagtttattgttcccttatttcttttgtaactttaatctcttatctcttttataatcttaatcagtcccttcgtcagtgtgccgagctgttccggtttgatgataaagggcggcatcagatacaccagcttgccgaacggacgcacccagataccttcctcgacgaagcgccgttgcatccatgccatatccaccggacgtttggtctctatcacgccgatggctccgagtacgcgcacatccgccacttgcggcagttggcgcgcgggttccaactcttgcttcaactgcgcttcgatgcgcgccaccttctcctgccagttgtattcgggagacgtgagcaggcgtaccgatgcacacgccacggcacatgccagcgggttgcccataaacgtgggtccgtgcatgaatgcacccggggcgtggttggagatggtgtccgctacttcgttggtggccagtacggcggaaagcgtcatgtagccgccggtaagcgccttgcctatgcacatgatgtccggttctactccggcatgttcccaggcaaacagctttccggtgcgtccgaagcccgtcgctatttcatcgaagataagcagcagaccgtgttcgcggcatagctttgccgcttcgcgcagatactgcggatgatagaaccacatgccgcctgcaccctgcaccacgggttccagtatcagggcggccagttcgtcggcatgctgttcgatggtttcctgtagcgggcggatatcttccggattccattcgccgtcgaaacgcgagcggggttgcggaacgaagtaccgcacgggcagtgccgagccgaacagcgagtgcatccccgtcaccggatcgcacaccgacatggcattccacgtatctccgtgatagccgctgcggatggtgacgaagttctgcttcttgacgggggtactctgcgacgaagccccttgccctttggcataccagtactgtacggccattttcagggccacttccacagccaccgagccggagtcggcatagaatatcttctgcatggacggcggaaccagcggcagcagcagtttgcccagctcgatggcagggtcgtgcgtcagtccgccgaacatgacgtgcgacatcttgccgatctgctctgtggctgcccggttcagtaccggatgattgtaaccgtgcacggcgcaccaccaggaggacattccctctatcagggtctgcccgctttccagcgtaatcgttgccccgtccgcctgcttcaccttatatacaggcagcggatgggtggtcgaggtgtatggatgccacaggtgctcgcggtcgaattgcgaaccgcagaactcgtatccggcttcttctatcagtttcttgtcatcggaaactttggagccgagcgtcgtcagcaggtcgcccacgatagccgagttgatacctatatataaggacttcttcaccgcatccttgctcagttgcgagcgtccgccggcaaagcgcaggtaggcggtggggttgatgaagcggaacagggcgacggtcaccaatacctcttcttccgtcagcggcgggcggttctccagcggagtgcccggaatggggctgagcaggttgatgggaatggattgtacccccagctctttcagggtgaaagcaaactcaatgcgctgttccatcgtctcgcccatgccgatgatgccgccgctgcaaatgtccatgcctgcgttgcgggctgcctgcaaggtgcgcagcttgtcttcctgcgtgtgcgtgctgcacagggtggggaagaaagagggggctgtttccaggttgcagtggtagcgggtgacgccggcattgtgcagggcgcgcagctcttcttcggccagcaggcctaaggatgcgcataattgtatggatgagtggcggcgcatgtagcgcactgtgttacagagttgttccaattgtttgggagagggtttccgtccgctcgtaacgagggagaagcggttgacatcctgccgttcattgtattgtgcctgttcgaggcattcttcagcggagagtaggttgtaaacgtcggcttgggtgtgatagtgggaagattgtgcgcaccatttgcagttttcggggcagcgtcccgacttggcgttgatgatggagcacatgtcaaactcatgctgcgagcattgtacggtaatctcgtgtgcagcggcgtaaagcgcttcacggtcggcggtattcgccagccaggcggcttggtcgggcgatatgtctatgcctgccagcacccgggctttcagttcgtcgatagtcatggtgtgaatagaataggggatagtccgaaccgtgtcctgcttccgtagcgaactgtcggccacgttcttgcgcagacaaccgattgtgacgcatctgcctatgctggcgaatgcggcatacgacttccgactccagcggcggaagcgtatcgtctgtgcaggggattgattgcgtttcacgggttcggtattttgttatagattcttttgacggtggcaaatgtaggaaataaaaacgagaaagaattttatatggctgaaaatatataaagaaaagtaggcagggcggttggagaaacgcttgcttcctttttgccggcgtaagcaatcctttatggtttatagggggagaacggcggatacctctatggggtacggaaagtaccaaaggctggtatgggaagtaccaatgtttggtacgtcggataccaacgtttggtacaacggctaccaacatagggtacgatgaataccaaccgttggtattgtcggtatcccacggtgatattcattgtacccaatggaggtataggtttatgtctatatagagaaagatataatacagtgaaaggagttataacttcgggttgtaaacgtaatccaccgcttttttggctttcagcgacgcttgtacgtctatcagccgttggttgctgctgccacggaagtagagatcttcgtcgcgcagttcttctttgaatttgccgtccaccagcacgtcgatgtactccaacagttttgcctggcggggattgtgcagtaacgtttcaaatgtataccccgtatagcaccagatgttcttccggctctgccgcttaatggcatgtgccagttcggtgaagccttcgggctggtacatagggtcgccaccgctgaatgtcacatcggcaaagctgtcggcaagcaccttttgcagtatttcatcggtgctcatccagcgtccgcggttgatgtcccacgattccggattatgacagcccggacatccgttgggacatccggctgcgtagatggcggtacggaatcccggaccgtccaccgtagtatcttctattatatcaagaatggaaagcactattcaacttttaattttcatggattactctgtcgttcagctcggcgagcttggcttgattccagcggtcggtagtacctaccagatagccggtgatgcgctgtagcttgtcgatgtgggtgctgccgcacttgggacaggcttccaggttgacggtagagttttcgtatccgcagtccaggcagcggttgcggttgtgatttaccgagccgtaaccgatgttgtaccggtccatcatgtccaccacacgcataatgacttcggggttgtgggtggcgtcgccgtcaatttctacatagaagatgtgtccgccgcgggtcaggtcgtggtagggggcttcgatttcggctttgtggcgggcgctgcacttgtagtacacgggcacgtggttggagttggtgtaataatcacggtccgtaatgcccggcaagcagccgaacttcttgcggtctacacgtgtgaacttgcccgacagcccttcggcaggcgtggccagtacgctgtaattatgctggtattggtcggagaactggttggcacggtcgcgcatgtaagtcacgattctgagtcccagttcctgagcctcttccgactctccgtgatgcttgcccaaaagcgccacaagacattccgccagaccgatgaacccgatgcccagcgtaccctgattgattacggacgagatgtcgtcgttcggtttgagcttgtcgcagcctatccacaaagcggacatcagcagagggaactgcttggcgaacgctgtcttctggaactccatgcgttcatgcagttggcgtgcggtgatgtcgagcatggcatccagcttggcgaagaaacgggcgatgcgctgctccttatccgtaatgcccatgcactctatggcaaggcgcacaatgttgattgtggagaaagacaggttgccgcgtccgatggatgtcttggggccgaaacggttctcgaatacgcgtgtacggcatcccatggtggctacttcgtgctcgtagcgtttcgggtcgtcggctttccagtcgtcactttggttgaaggtggcgtccaggttcaggaagttcgggaagaaacggcgtgcggtgaccttgcaggcaagttggtagaggtcgtagttgcggtcttcgggcagatagcttacgccgcgtttctttttccatatctgaatggggaagatggccgtttcgccgttgcccacgccctggtacgtgcttttcagcagttcgcggatgatgcagcgtccctcggcggaagtatccgtaccgtagttgatggagctgaataccacctggttgccgccgcgcgagtgtatcgtgttcatgttgtggatgaacgcttccatggactgatgcacgcgggctacggtcttgttcacggcatgctggatgatgcgctgctcgccggtgaggccgtccagtggctgttgcaggtaatcggtgagctctttccggtagagatgtgagtaatcctcaccgttcagctcttccaggttctttacttcctcgatgaagctgttgcgcacgtagggagcgaggtagaagtcgaacgcgggaatcgcctgtccgccgtgcatttcgttctgggcggtttccaatgagatgcagcccagtatgctggcggtttcaatgcgtttcgcagggcgcgattctccgtgtccggcagagaagccgtatgtaaggatgcggtccagcgggtgctgtacgcaagtcaggcttttggtggggtaataatccttatcgtggatgtgcagatagttttggctgacggcatccagcacttcttcgctcagtagatagtcgtcaacgaaaggtttggtggtttcgctggcaaacttcatcatcatgcccgccggggtgtcggcgttcatattggcattctcacgggtgatgtcgttggatttgatgttgatgatttccagaaacatatcgcgcgttttcgccttgcgggcaatgctgcgctggttgcggtaggcaatgtatttctgtgctacatctttacggctgctcttcatcagttccatttccaccaggtcctgaatggcttccaccgtcatctgggcatcgcccttaaaggagatgtggtcggtgatctggcgtatcagttgcatgtcttctcccttgtccgtatggagcatggccttgcggatggcagttactattttctcttcattgaagccgacgatgcgcccgtcacgcttgagtaccgtttgtatcatgttgattgtatttttagattttacaaataggagttaattgcgaaacaaaggtatgatagttttctgtaagttttttgttttggaaaacttttgttggattaaaaatggttaatgtattgataatcaaatatgctttgttgtaaaatggaaaactttatagaatttgatgcttttacaattgtatcttattgataattatgagataatatatctgtcaatctatttcaaaatgacagatgagaaatagggattttatttgttgttttcttaaatactttggttatatttgcttctctttgttctttgtatgaatagggtaaagacttgaatttctaactattatcagttaaaagaaaagtgaatatgggaaaactgtttccaccttttaaggtcgatattgcgggagcattatgtgtgccttttacgttgcgggatgcaagaaaccgatatcagcacgggcaaatcagcctgtcggcattgcgtgccattgaaaataaggaaatatgcaaattaatggagcgattgaagctggaaggtatagaggttgtgacagatggcggacttcggagttatgactttttggaaggctgggaaggtatccgttgcagaaacaatgctgattcttcattggaaaagaagctggaagtgaccggcagaatcggtttgcttcatcaccctatccttgaagattttgtttttctgctaaagaataccgcggaaaatgtattgccaaagcagcatataccgtcgcccggcaaaatgttgatgaggattcttcgtgaaacggaagcggggtgtttgaagtcggtttatccggatttgaacatactgttggatgatttggctgtcgcttataagaagttgttggaagggttgtatgaggcggggtgccgttatgtacagtttgagggagtcaaatccatgctgaccgatgaagctgcccgtcttaacaaccgggtactgcgcgagcgtcccgaaggattgtttgtagcgtttcatgccgcaacggatatgttgatacggttgcacggggcggatgcttacttcttgaattacgattgtggaatttgcgaccgtagccgtctgctgtggtttgtgcatgaacgggaagctgtgtttggctttgtgctttcttattaccccgatgaggaagaactggatgaattgcaggccaagatggaagaagtgctgaattatataccgatgaagcatttgacactctgtctgcccgatgcggataaccttctcaatccttcggaagaggatgaggtgaaacagtggaagactgtgaggttggctaaggatatggcaaaccgtatattctcagtctgaatgcacacgctgttcatctgagcatgttattatgccggttgcgtatttcagtctgccggtctgcgtggccgcaagccaattctataaaatcaacgaatgtgtgtcaaaactaaaatccgtttactatttgtttcttttttagacacggattacgcggaaaacacggatctcacaaattttctttattctttttctgtgaaatccgtgttttccgtgtaatccgtgcctaaaagaaatcgtcaagtgtattttgacacatctccgttggtcttatattctgccggctttctttgcttatttaagaacctcagccaatttctcttgcaattcttctccgtgcaagccgcgtgcaaggatgattccgtcaccgtcaatcagtacagtgtgaggaatgctgcttacggcatacaacttggcgccttcgcagttccagtatttcaggtcggacatctgcggccaggtaatattcagtttcttgatggcctctttccaggaatcaccgctctggtctaaggaaacgcctacaatctcgaaattcttgttcttgtatttggcgtatgcctctaccagattgggcatttcgcgacggcacgggccacaccagcttgcccagaagtcaacgagcactgttttgcccttgcccacatagtcggacagttttaccgtttttccttcgggggtctgcatttcaaagtccgtaaacttctgacctacggcagtggctttcatcttttctacgttctccttgatgcggatgatggtttcgtcgttgttgtatgctgcgggaatttgcgacatcagcggatcgagttcttccacatccatgtaatagtggttcttcttgagcaggaatactcccactgcgttattgatgttttgtttgattccctctttggcagtggcgatatattgctcttccagatcattcatctgcttggctttggcttcgcgctgttcgtctgtcagggctgtgtcggacatggactggtagatggcgttcatctgttggttcagttcgttttgcttgtcccggatgcgttggtaaatatcattgttggctgtaccggtggcagagtcgccttcgccggaagtcagtttgatgttgattgctccgttttcgaggaagaagtccatcagcacaccttctttcccggagggctggcacgtgatatagcggttcacagcactgtcctgcgttcctttgaaggtgaaggttccgttggtgatgactgcagaatcgagttttacgagctggcggccttctgcggtttgcagataaacggtatcgccatcggcagcgccttctactgttccggttacggtgtaacctttgtttccgctgttacaagctgcgaatacggcagcggcagcgagcaggtaagttaattttttcattgctttgttcatttaataaataaattgttgcagcaaagataataataaaaaatcctcaccggcataaccggtgaggattttatgttttttgtcccttttttacaaggatagctctgctttttattcagcagcagcttctgctgcgggagcttcttcagccggagcttcggttgcttcttctgcaggtgcttcagcggcagccttagcagcttcttcagcagctttcttttcggccagtgccttagctttcacttcatttactttcttttcagcttccagacgtactttggcttcagctttcttagcttcttcttccttagctttcagagcagccaaaccgctttgtttgttgttcttccaagcttcgaatttagcttctgcttctgcttcgccgaatgcgccttttgctacaccgccaagaaggtgtttcttcatgtaaacgccttcgcgagagaggatgttgcgaacagtgtcggtaggttgtgcacctttcaatacccagtcaagtgcgcggtcgaacttcaaatctactgtggcaggattggtgttagggttgtaagtaccaatcttctcaataaatttaccatcacgtggtgctcttacgtctgcaattacgatagagtagaaagcatagcttttacgtccatgtctctgcaatctgatttttgttgccatttaaataaatgtttttagttaatgatttgaattatgctgctatctcgtaacagcgggcgcaaagatacgctttttcttttgattgacaaagagtttgcctgatattttcattgtcgtgccataaatgcgcttctgtgtgaaagacggatgtgattgtgtcctgttctttaaaatgtctccctgccgtgcccggctgtaatctgcttaaatttcactttttcaataatttaaccctataggtattatcctcttatttgtccccctctcatttttcccggtttcattgtttccacgtaattttgccttatccgacaaacgataacatatcaggaacaaacggacctatgttgtctttgccggcagacgaaaacttttaatactaacactaaaaacagatttgtaacaatgaagaaaattacagcaatttcagttgtttccctgcttttactcgcttcctgcggcggcaagggaaaggatgccgcttccatggattatggattggaagaagcaaacgaggtaatatcctattacaacacaagcatcgacatcaccaagaaaatggtggacatgggagagatctccaagattatcgattatatgcagaaaaacggtaagactcttgtagcgcccgttgttatccgcacgccggtttccgcaacagacacgactgctttattgaaccccggcgattgcttcccgtcctcggctgccgacagtctgaagatgtactaccgtcgtttcttcgatgtgtccaagcgtctgtatgccaattatgatgcttaccgcgcctacatcaaggccgaagactataaggacgacaactatgccaaaggtaatgaaatctgtaaggaagagaaagagttggcagaacagattcccggacttcgttcccaaatctatgccctgcttactccctatgccgataaagccgaagaggccacactgatggataatccgctgaaggaccatatccttgcaggaaaggctttgatttttgagatagagaagactttggaactctattcgcccgaagccaagaaagaagatttgcaggctgcttacgatgctgtcaacgccaagaaagaggcagcttcgaagttggagaagaaagcggatttccagagtgagatgtcgaactacgataatttgctgaagtatgtggacaagtttctgggagaactccgcaagcaactgcgcgacggaaagttcaccgaggatggttataatgatttagtatccgaatataatgacgtaatcagccgttacaatagttttataaactgatcggcgttcggaatacagccggtgtccgggaagaactatgagtatcttcccggataccttattaatatggcgagtatggcgcaggctcccatgcagaacgggtagtacagattgcctatgatgctgagcggcgagatgcccgccagtcctgcggctatcagcatttgtgcgccgtaagggataatgccctgaatgagacaggaaaatgtatccagtatgcttgctgttttccggcggtccaggtgaaagcgtttggctatgtctttggcgatgggaccggtggtgatgatggcaatggtgttgttggcggtgcaaagattggctacactcaccagtgcggctatactgaattccgcaccccgcttgcctgtgacgtggcgggtgaggcgggtgatgacaaagtcgataccgccgttgtagcggattgtttccagcattccgcctgccaacagggtgatgatgataagttcgcccataccggtgatacccgttcccatagcgccgaaccaatcgaagaaagcggtgcttgcattcatgttttcggcaggagtgacgtcgaagacgcccgttgccgtgcaaatgccgatgattcccgtagagacgatgccaagtagcaaaaccaccatcacattgactccggttattgccgtacccagtacgataaggtaggggattacctttatccattcaatctcgtatatctgcggaacggcggataaggaaagtccctgaattacatagatgcccagtacaaccagtgcagccggcactacaatcatgaaatttattttgaacttgtccctcatcacacaatcctgcgttttggtagatgcaatggtggtgtctgatatgaaggaaagattgtctccgaagaacgaaccgcccactacaatggctgtcatataaggcaggtcgataccggttttctctgccagtcccaccgctaccggagtcagggcaacgattgttcccacgcttgtaccgatggatagggagatgaaacaggcggcgatgaaaatacccgccagcagcagattgtccggcaggatatgcagggtcaggtttacagtggcgtcgatagctcccatctgtttggcgctttgcgcaaacgctccagcaaggacaaatatccatatcatcagcaatatgttcttgttaccggccccgacggagaactgatagatgcgttgttccagcttcagtccccgcgtaatggcaatggcgtagcaggacgacagcagaaatgctaccgttatcggcactttatagaaatcgtttataagcagtgatgtgatgaggtataaacaaagaaatacagccaacggactcagcgaccaccagccgcccttttgcttgggagaggtatttgtatctgcggacatactttctatcatgagtttataagaacgattgttttgagtaaatcggctgcaaagatacaaaaacggatggaattctggtgcatatctaaatattcggacagaagaacaaaagaacaaaaaaggaaaaattttatttttctggtaacattacctatttttattcttttgttcttctgtccgaatcattgtggaatacccgtcaacatcagacgataattccgtgcactcgggcaatgagcgcttgccgttacagtgtcacccctgtcttgaaaatggcgatttctttataacctttcttttcattgttcacaaactcgccgcttgctacgcggataatgtagtcgacgaaacgttcgcaagtcttttccatcggttcgttttcaaggataacgccggcgttgaagtcaatccagcccggtttgttcttggcgagggtggagttggtggaaatcttcatggtcggtacgtacgttccgaacggcgttccgcggcctgttgtaaacaataccatgtggcatccgcacgaagccagggcggtggcggcaaccaggtcgtttcccggagcggaaagcaggttcaggccttttactttcaggcgttcgccataaggaagtacaccttccacatagctcttgccgcacttctgggtgcatcccaaagccttgtcttccagtgtggagataccacctgccttgttgcccggcgacggattctcacctaccggttcgccatgcgagaggaagtattccttgaagtcgttaatcagctttacggtttcttcaaacagttctttgttgcggcaacggttcatcaggattgtttccgcaccgaacatttcgggcacttccgtcaatacactcgtaccgccttgtgcaatgaggaagtcggagaacatgcccagcagcggattagccgtaatgccggagaatccgtcggaaccgccgcatttcaaacctacacgcaattcgctcagaggcacgtccacacgttcgtccttgctggctttcgcgtagagttcgcgcagcagtttcatgccttcttcgtattcgtcgcccactttttgcgtcaccatgaactttacacggtcggaatcgtattcacccaaaaactcgcggaatacatccggctggttgttttcgcatcccaaacctaccacaagcacggcgcctgcattggggtgcagcaccatgtcgcgcagtattttcttggtgttttcgtggtcatcgcccagttgcgaacagccgtagttgtgcgggaatgccatgattgcatccacgcctttgccgtctgtctcgcggcgcaggccttctgccagttggttgacaatgccgtttacgcaacccaccgtggggataatccatatttcgttgcgtactcccacatcgccgtttttgcggcggtatcctttaaatgtcaggtccttgtgcggaatgtccagtttcacttcggtggggttgtacgtatattccagcagtccggcaagattggtcctgatgttgttttcgttcatccagtcgccctgtttctgtgcggtgcgggcgtgtcctatgggataaccgtatttaattacattctcgccttccgcaaaatctttcagcgcgaatttatgtccggcagggatatcctcgttcaggatgatttccttgccgtctactatgagtttttcaccggccggaagtgctgtgatagccaccgcaacgttgtcggccgagttgattttcaggtactttgtttccatatactatgttttaattggtttcgttcgatagtgtcgtattacagttccattgcctgattgcccggcactcttatctgttataatagaattctatattttcttttgtcagcaagtcaatcggcatgaagttctcccttgcgatttcttttttcagaatcaggtggtcgcacaatgctttgatgccgtcgaagccctgcagtgtaggctgttgggcgataaggaagaaaatgcttccttctttcaggcagtccacattgcgtttcagcaggtcgtaccccataaggttgaaatccgttttccggtgtctttgaaggtactctccgatgatgtatgctttggagttgaatgtgatgccgttctttacggtgggatgggtgcggaagaaatcatccagcatctgtgcatcttcaccgtcgcgtttggcgtgcaaatccagttcccagatgcgacagccgggatgatgctcgcgcatatattctcggaaaccgatttcccgccgttcctgttggttcgaacctacaatgccttcgtttatcttgcggaagataacgatttcctgtgcatcctcaccggcaagcagcatcagcatacgtgcggcaaaatacccgctttggtgtgaattctgtccgaagaaagagagggcgggagcttccttgatattcgagtctatatatatataaggtatatccagcttttcaagttcatcggtaaagggagtggtgtactgcggggcagtgggggcaaacaacacaccgtcgggcgtcatttccacgatactgtgggcttcccgggcgaaggagcggtaatcgtacgggtcgtagtatctcagcttcacggtgatattgaaatccgagtaggtggtcagcgcttcgtgtatgccgctttccacttcggtccaatattctccggtttcgtgctggggtagcaggcaggcaaaggcgtacttcttgttggaagccaatgcgctggcgtacatattgggctggtagttcagtttctccagaatttcttccacgcgtttgcggctagcttccgacactccgctacgtccgtggataacgcggtctacggttcctaccgacacatcggccatcttggcgatgtctttgattcttattctttccggcgtattcatggttttactcatggttttttgtgcccgtgcacaataataatctaaatattttcgatacaaatatataacaatttttgtaattacgaaaattgttgtatctttgtgcccgcacacgaaagctatgaagaacaagctgtcttttagtttactctgcatggtatcaggtgtttagctttttaataggagctgatgtgataatttgaaagaaacaatttaatcatagtatttaataaaaacatagaattatgggaaagaaagtcgttacattaggtgagattatgttgagactgtccactccgggcaacactcgtttcgtacagtccgattcttttgatgtagtatatggtggcggtgaggctaacgttgctgtcagctgtgccaactacggtcatgatgcttactttgtaacaaaattgccgaaacacgaaatcggtcagtcggcagtgaacgctttgcgcaaatatggtgtaaagacagacttcattgcacgtggtggcgaccgcgtaggtatctattatctggaaaccggtgcatctatgcgtcccagcaaggtgatttacgaccgtgcccattctgcaattgctgaagccgatgcagcggatttcgatttcgacgctatcatggaaggtgcagactggttccactggtcaggtatcactcccgctatctccgacaaggctgccgaacttacccgtctggcttgcgaagctgccaagcgtcacggtgttacggtatcggtagaccttaacttccgtaagaaactttggacaaaggaaaaagctcagtccatcatgaaaccgttgatgcaatacgtagacgtttgcatcggtaacgaagaagacgccgaactctgcctcggtttcaaacccgatgccgatgtagaaggcggtaagacagatgcagaaggttacaaaggcatcttcaaggctatggctaaggaattcggtttcaaatacgttatttctacattgcgcgaatcattctcggcaacgcacaacggttggaaagcaatgatttacaacggtgaggaattctacgaatcaaaacgttacgatatcaatccgatcatcgaccgtgtaggtggcggtgactctttctcaggcggtatcatccacggtttgctgactaagcccaaccagggcgctgccctcgaattcgcagtggctgcttccgctttgaagcacactatcaacggtgacttcaacctcgtttcagttgaggaggtagaagcgctggcaggcggtgacgcaagcggtcgtgtacaacgctaatgatttttttcaggcacggatttcacggattccagtgtaataattacgcagaacacgctactaatccgtgtctgaaagaacagaaaaagagttatttccatacattaaattactgattaatacaatggcaaaatttgataaaatagccgtattgaacaaaattggttcaaccggtatggttcctgtattctaccacaaagatgcagaagtggcaaagaaagtagtgaaagcttgttacgatggtggtgttcgtgcattcgagtttaccaaccgcggtgactttgctcacgaagtatttgcagaagttgtgaagttcgcagcaaaagaatgccctgaaatggctatgggtgtaggttctatcgtagaccctgctactgcggcactgtacctgcaattgggtgcaaactttattgtaggcccgttgttcaaccccgaaatcgctaagatttgcaaccgccgtctggtggcttacactccgggatgcggaagcgtttcagaagtaggtttcgcacaggaagcaggttgcgacctttgcaagatattcccgggtgatgtactgggcactaaactcgtaaaaggcctgttggctccgatgccgtggtctaagctgatggttaccggcggtgtggaaccgacacaggaaaacctgacttcttggattaaagccggcgtattctgcgtaggtatgggttccaagctcttcccgggcgataaggttgctgccgaggactggacttacgttacggagaaatgtaaggaagctttggcttacattgcagaagcaagaaagtaattattatatttcattttgtttaaaggtgtttaaaggggacaaccatcgaggtgctacggcacttcggtggtttgttttttatacccggtgtaatgctttcggcggatagtgtgtcacattggtagcattttaattgtttacaagtgtaaaagagacgcttaatctctaaaacaatgttataaaatacacacttctttcccctcctgtttgcgcacacggaaaaaagtattacctttgcaatgcagttgggaaattgctcttataaaagaataaaaagataaagttttcagtataggtaattagttaagaggtaaaaagattgaattaattcataggtaaaagttttagattaaagtaggtaattagaaaaaggtaaaagttaaacattaagtgttatttaataggtaattgaagtttgttttttagaggtaaaaagaaagattgattttcaggtaacaaaaatttgatgcaagtaaaaaaagaaaagcctttgggcttttcttacacgaggcgaggggttcggaagagcttgctcgtttttttatttctgtattttatgctcacttttttgtatattctgtccaaactcttcccgttttttgtatctttgtaacgaatgtccggcaggcaggctttccggaacatagaacaacaggcttaaattgcatggattttggaacacttgttatatactcttgattggttgctatacattttattcgcgataaatgtggcatatctgctggtgtgcagtctggcatcgctgtgccagtacaaaccgttcgttaccgcaccggcccggacaagcaagcgttttgctgtgttcattgccgcttatcgcgaagatgcggttatattgcctaccgtgcatgcctgtctggcgcaggattatccggacgacagatatgatgttgtggttatttcggaccacatgcaacccgaaaccaatgcggttttgtcttcactccccataaagctgcttcaagtcgattttgagaagagcaccaataccaaatccctgcaagcagccctcggatatctggacaaagccgcttacgacatagcattggtaatagatgcggataacattattgctccttcctacctgtccgagctgaacgatgctttctccgtgtccggcgtccgggtggtacagacacatcgtgtggccaagaatctgaataccggtatggcatatctggatgcaatcagcgaggagataaacaattccatattccgtttgggacatgtcaatttgggaatgtcggcggctctgataggttcggggatggcctttgaatatcccttgttttacgatgcgatgatggataacacctctgtgggcggttttgaccgcgtgctggaaatgaagcttctttataagggcatacacattcattatctgcccgatactatcgtcagggacgagaagatacagaaagcgaacagcttttacaggcagcgtcgccgttggctgtccgcccagtattacagtttctttgagtttgccaatcacctgctacctgccattcgtagcaggaagtgggacttctgcgataagctttatcagcaaatctctctttccagagtgttgctgctgggctttgtgttcataatttccctcgcacattccctgttcgcgtctccgtcggcctgtaaatggtgggggattttcatactgttgctgttggcgctggctctcgccattccccgcaaatattggaaatggcgtttgctgaaagcggtttgttgggttccttactctttcctgctgatgcttttgaacctgttccggctgaaggaagcgaacaggcggtttattcataccacgcacggagtcgattgaaaaattatgccatggaacggaacgtccccgaaatatcagtgatagtgcctgtatataacgtcgagcaatacttggccgaatgtataagcagcattttatcgcaaacgtttactgatttcgagttgctgttggtagatgacggcagcccggaccgttgcggggaaatctgtgatgaatatgcgggtaaggataagagagtaagagttttccatcaggagaatgcagggttgagttgcgcccggaacaaagggctggagcacgcatcggggacttatattgcatttgtcgattcggacgattacgtcacttccacctatttgcaggagctttacgcatcattgcctgccgataagtctcaaagaggaacggtaatttgcgggttcgataaactgtttcccgacggttctttgcataccgttcatgttccgcaacaaaccatcttgccgatggactgttcgcgtgtgcttgcagagctggttggaaagtacgtaatgtatgcctgggcaaagctgtatgacaacaggctgataaaggaacacggtctccggtttgttcctgctgtgtcgggattggaagatatgctctttatgctcgactatcttccttattcggattttctgcttatccgcgatacttccacctatatatatagggtgggatattctatggctacattatccacttgcataaaagatttccgcagcgaatacgccgctttttccaactatctggaaagagtatgccgatataaggaaacctatcggttggaggattcctctttggtcggggtatgggattcattaacggtgttttttcataaaatcctgttggcaatctataagaaagagaatcattatagccgaaaagagcggattgtttttttgcgtcagttgctttcatcccacaggaggtggatagaagaatgcttctctccccggtataaggtggataagttctcaaggtttttgctggtcaatgtcggtgcggttgcttttgatgtgtggatgcgctgcctgtggggaattaagttcaggtatatgtttggagcggaaagatgatggaacaatgtgtcatatctgtaataataccggtctataaggcagaaaaatacctttcccgttgtatcgcaagtctgcttgcccagtcttttacagcttttgaattgttgttaatcgatgacggcagtcctgacaacagcggcaagatatgccatgactgggctgaaagagactgccgcatccgtgtgctgcatcaaacgaatgcaggtgtcagtacggcccgcaacaaggggctggatgaagcgaaaggagagtatatcgtttttgtcgattcggacgattatgtaggtacggactatctgaaacatctctatgaggaaaggcctttgaatctggactccattgttgtacagggatttacaattgtgtcggagcaggcagacaggcaatatacaacctcttttattccgtcggtctataccggtagagatgtcagggagctgtttctcaatgatgagatgcgggatatgcggggaccggttgccaaacttttcagccgggttctcattgagcggttggggttacgctttccagcagagatttctttcggtgaagatacgatattcaattttcaatatttgtttcattgccggcaggtggttgtaggcagccatgtagattatgtctattgcgacgtacccggttctttgacaaagcgtctgaatgattttgcatcggagtatgcaactttcaaattatataaatcgattactgtacggcttgccggaaagttagacttgaatgtggcggatatgagaacagctttctcctttgtcgtgctgtttttccagcgtgcattgattgccgactatcgctctgccgggaaagttcctttctcattacggacacaacatttgcgccggttggcagcggaacagcgctcttttatgaaagagttttatcatcccggatataaagcggacaagtggggcaggcagttcctgttgcatggtttctgcttttgttataatctctatatgtccatactttgcagttgcctgttcaggtacgtattcggttattccgaaaaggcatagggcaggtctggtttcattttacgataagaagaaatggaaattctatattcaatcattattccccataaggacataccttgcctgttgcaacggtgtctcgattccattccgcccagggacgatgtgcagattatcgtggcagatgatgacagttccccggatgttgtggactttgctcattttccgggcagtgacagggcggatgtggagattctctttaccaaagagggcagaggagccggttatgcccgtaattgcggacttgccagagccaaaggcagatggctggtatttgcggatgccgatgatttctttctgcccggcttcctgaacgtattggatacttaccggaatacggactatgacttgattacgttccgtgcggaaacagtcgattcggatacactggctccggttccgtcacgccaggtccataatgggaaaatagcggaggacatggaccttgaaattctgaaataccgtaacgacgtaccctgggctaagatggtttccgcagaattggtgcgcagataccgtatttgctttgatgaaacggttgccgccaacgatgccatgtttgccgcttatgtggattaccatgcccgtaaagtagcggcatgttccgggtatgtttattgtgtcacagtcagaaaagattcattgcagtatggagtgcggtcagacactcttcttgcccgtgtaaaggttgcttgccgttacaaccgctttttgctggatatagggcgtagcgataaggtactttacagttattcccgtgtgacggattgccgcaagcacttcggcagtaaaggatattgtagagctttgtgtatttatcttcggtttgaaagttggaaaaacatatacaggacttttgcagaactgttgaaaagtaagtttcattgtacttccataaccaaggttttataaataatgttttacaatgtcagaatcccgcctccataaaagctatctgaatgcgcgtgtcaatgtattcttttaccttgtcacccttttcatctcctttttctctaggaagatatttcttgagaaactgggggcggactttgtcgggctgacgagtacgatgcagaacctgcttggctttctcaatctggcggagctgggcatcggagcttccatcggctatgtgctttacaaaccgattttcgacggaaatcgggacaggataaaggagattgtctcggtactggcttatctctatcgtaacgtaggactgctgattttgggtgcgggactgcttttggcctgcttcctgccctatatattcgccgatgccggcattcgcctcggagtaatctattttgcttattttgcatttttgacttccgctctcatcagttattttgttaattaccggcaaaccctgctgggcgccgaccagcgcaactatgtagtcaccgtttattttcaaacggccaatatcatcaagattctcctgcaaatagcattggtatgctacgtgggcagtctttatctgtggatagccattgaactgacattcggcattttgtattcgttcatactgaactggaagataaaccgggtatatccgtggctgaagtgcagtgtgtcggaaggcagactgaaatatccggagaataggattattgtgcgtaaagcccgtcagatgtttgtacataagctggcgggaatgggcagaacgcagcttttgccttttctggtctacgcatttacttcattgaaactggtggcgtattacggcaactatatgctgctgctcaccaagctgaatctgtttgtcgataactttctgggcagtaccggcgcaggggtgggcagtctgatagccgagggggatatgaagcgtatccagcaggtattttgggagttgagctcattgcgctttttgatagcctcgtttctgacgttcgcgttgtatcatctgatggacccgttcattacggtgtggctgggcgaggagtacatactgccccgttccgtcttgattgtgattcttaccaacttctttatcagtcagttcaggggtacgaacgatcagttcattttcggttacggactgtttcacgacacatgggcaccggttgccacactggcgataacagtagcggtggcattggcaggcggctatttgtggggacttccgggagtattgctgggagatatagccagttcgataaccgttatcagtatctggaagccttatttcctttacaaagaggggtttaaaatgtccgtgaagtcatattggaaaaatatattccggtatctgctgcttgccgttctttcatgggggctgacggatgcggtactttgtttccttccgttggcggagccgtcccggggatatggcatgtggattgtatatgcgctggtctcctctctggtatttctgctgatattgtgcagcagcttctattgctgttcggcagggatgcgttcgctggtgaagcgtttgcggcgtaaatagaatgcatacatgtggagtttattataatttatccccattaaactgaaagtttattcctattgaaccggaagtttattcctaataaactatgagtttaatggggataaacttttatcggtactgaacgaacattccccgataagtgccgcatagcgttgccttgtcaagtgtgccttgtccgtgcagcagatatacggccgcttttttaggagcggcgaggatgcagaggtaggtacaagacaggtatttcctgatgcctcgcagattccggcgggcgaagagcacacgggcgcgcgacaggtagaattcccgcatcggactgcctcgcttcgccgtcatgctctctttgtggtagactacggcagcaggttcgtaccataggcggtaaccggcttttctaagctgtgcagaccagtccagctcttcgtaaaaaaggaaatatatttcgctcatggggcctgcatcctgtagcgcctgccggcttaccatcatggcggctccgtgcaatgaggcggtttcgcagggagtacggaagcgcgggccgtcctgttgcatgaatccgatggatgcgttgcgcagtgtaagggaacttagaggagtgaagcctgcatattgcaggatgtccggacaagcggcgaatttcaacatgggcgatacgccgccgttacgttgcgggtcgcactccatgcgtcgtaccaacgcatccagtaccggttctttgatgagggtgtcgttgttgatgaaaaagagataatctcctccggcggctttcagtccggcattgttgccgccggcaaatccgttgttgatgttccgcaccactttgacaggaggaaaggaggcggggttgtccgatgcagggctgcctgataaggagccgtccggtacgaggttactcctgtatcgttcctgtatttcttccgcttcgggcaggcgcgaaccgttgtccacaacgatgatctcgtagtgcggataggtttcgtggttgcggaaagagtctatcatttcgcaggtatcgcgcaacccgttatagttgacggtgatgatggaaacaagcgctttcatggtcttttcctattttttcttcagccagaatacagcccagtttctgaagcttacatattttccgagccgcaggcgtctgaagcggcaggcggtttctgttttttcaagcagcgacatccggtgtcccgcccagattacatcgttcagggtgtaggacaggtatttgcggatgagcgttttccattcgggatgttcttgcccgagtgcctgcatttgggtacatacggtggtgtatccctcgatgttgcgcattccgaagcgactggtcataatggagtggggacgtatccttcgcccgaagaaagcctcgggaacgtagcacgttctttgtgcattcagataaatcatcatagtgaaagaatggtcttcgtggataatgccgggatgaaagcaagtgaagcattttttcaggaacaggcgattgaccatgcacaggtaaacgggagtgaggaacaggcggttgctcagctcataatccagcatttccatgccggaatgtacggattcgtctattttcccttttctgtcataattgggaatattctggctgtcagccgactccgtcagcggttttgcatcgaagaagatgaagtccagttctcttttctcgcacaaatcatggcagcgccggagggcttgcgtatccaatatgtcgtcactgtccataaaatatatgtacttgccggtagcatgcagcaatcctcggttgcgtgcaacggataatccctggttgggctgcgcgtaccaccggattcttgcgtcgcgtttcgcgtattcttcgatgatgccgcggcttccgtcggtagagccgtcgtcgataaggattatctccagttctttcagggtctggccgcaaatgctgtccagcgccttgcgcaggtaggcagccgtgttgtatatggggatgataacggaaacttcgggcatggtattttacttttttattcggacaatctgttcatacacttttttcatctgttcttcccaagaaaggtgtcggatggaatctcttatttcccgaggcgtcacggtcatgtgctggaagaactctatcagggcggggatgctgacgggactttcgtcggcgggcactttcagcgtgtagggcatgcggtcgaaatcatcgtccgtttcggagtagacgaagccgaacccacgcgccgcatattccctgtttttcagggtcttgatgttgtatatgccgctgcgatgccgtgccagactgcctatggcaaagtctgcccggttgaaaagcgcgtccaactcctcgccatgctttgctccgtacagggtgacgaacggctgcaagcagtaccggcggatgagtgttgcaatgtctttctcttcccgcctgccgctcggtttgcctatcagatggaaatagactttatattcggggttgttgccgtaatatgctcccaggcctttcagcaaccggtcgaaaccatgccagaagtggatttcggcagctcctatcaggtggagttccttgctcgtgccgtgccggggagagcgcagggggatgcgggcgaaatctattccgttggatatgcggatggtggggcgaccgaatatccggtcatcgctggagaaggttacaatgaaatcgacgtacctgcagaacgcatggcggaacagcttgtccgtgtacaactgtactttctccatgccggaagaatattcgtggtcatagggatatgtgggtatctccagcagcactcttacaccctgctttttcagcatcctcacgaagtgtatggtaaaggggttggcgttgtgataggagcggatatatacgcattgtatgccttcccggcgaacgtattgcaggataggggcgaacgacagccgtttttttattttggcgggtattcctttgcccaaatcggcaagcacatcttcgtctatcatccacttccggctgccgtcgttgccaacctcgtagtggcaggtgcgtacatctgtcccgcatagcctgagggcgtccgcctggtatctgattttcttactgataccgttgtattcctgaaatccgtaaaagacaagaaaaagggttttcatgggcggaggtcatttatatgtcgagtgattgatatacctgaatcagctcatcggctgtctttttccacgagaattgccgggcgcgcagcagtccgtattcccgttgctgccgatagagcgcgtcttcattttcgagacgcagcactgcaccggctatttcttccggttggcggggatctgcggcaagtatgtccggaccgcctatttcgggcatggaagaggtgtttcccgtaatgacgggagtgccgcaagccatagcttccaccagagggatgccgaaactctcgcgcagcgaggggtagaggaaagcgaatgctgcattgtacagcgtggcgaggtcggcgttgtggatatagccgggatagaataggtgccgtttcaggcggttactgatgttttcctgttgcagcagcctgtctatataggtttcgttgaggtctgcgatgagcagcggacgccttacggacgatttttccagataaaggctgtaggctttcagcacccgcgccgtattctttttagggtccgtgtttcccaggaagaacaggaagtctttttgggggatgtagcggtttactgtctgcatgtctatgtcgtccatcggacggaaatgtctgttgtagccgttgtaaatggttgtgatacggtcggcgggaatgttcagggcttcgcggatgcggttgcgttcgaagtgcgaaacggtaatgattttccggcatttcttcagaatccgtggtacggtgaggcggcggtagtgccggcccatttcctgataaagcgagggactgcgctgttggcggggttccagatagatgatgtcgtggagtgtcagcaccagcggaaccggacagcagagcggggctgtgttggacgtgcaatgcagcaggtccgcccctaaacgtttcaccgccagcggcagggctatctgttcccaaagcgggtaggtgggacacgccacttccacaatggagaggttggcagattcttccaggcaatggtctttgcccggagccacgataatgtagtattcattgccgtcgttccgtttctgcaattcgcggatggtttccagtgctacgaaatccatgccgtgcttgtcgggacggaaaatccgttgggcttctatggctatcttcatgctgtgtactccttatttctttttatagaagaaccgttttatatggctgaatacggctgtaaacataagtaccgggagcgcccagatggctttgcggagacggcggcttacttctccttcgggcagtgccatgaggaaggtgaggataagcgttgcaagcagtacgtaccacttgggagcccaggtccagttcagcagggtgatgcctgccgtgcatagcagaattagtgcgataagcaggaaacgggaaggcatcagccactgaaaaagtttgagggcatagtcccattcacctttcagcaataccagcgggagatacttcaatgcaaagaatgtgctggtatattgcgaacggatccaactgatgcgttgcgtctggtagccgtctgcattatcttctttcttgctgtaacataccacttccgccagatattcggtgtagatgttctgttccagcagtacggtttccatcgccttgcttatatcggagcctttcagcttgggagcacgttcatggaacatggcgaaatcgaatgccattgccgaacctatgagagccgaggaaaagcccatgcgggtatgtgccagacggaaaagattgttgttgatttcttcgctggtggcattgagaacagcgatgctggtattcaggttctccgctatgcggtgtgcctggatggaatcgcaaccggagtagtaggcgttgttgaacatgctgagggcgttcggcacgatatggttatcggaattgaagatgacaatcaggtcgtattcgtcgggagcgtagcgttccataacctgctggatggcgtagactttggtgcagtattccttgtcgggcactacgatgtttacgggcatttgcagcagggtgacaaggtcctcttcgggcagttgggtggctgctacggcaacgtcgtatttgtcgcgcgggtattgctgggtgtccagaaagcggttgacggattcaattacttctttcccgttgcgcaatacggtaaaaagcactaagaaacggtgctgtacggctgccgccggataagggttcttgtactttccgagcgagaagagtgcgcagagaaacaggtaggctaccggaatagccagcagcaggaataagacggaatctgtcatttgtagcgcattgttgctctcatccatccaccagtctatgctgaatatgttaaaaatgttggacatcatagcatcgaatcttttttagttgtggttaataatgcctgctgtttttcaatcgtcagacgttcgtctatatattttccgttcatcagtatgcccaggaacataatcatcataatgccggtggggaactgggtgaagaatgcgttcccgtaggcgctgagcatcatgccgaatatgccgcaggcaagtgcggtgagcaggtggcgcagctcgtcattccttattttgaacatgatgcagtagcatccccatagcaggctgcccgcataaatcagcaggtaaaggagaatgcccacaacgcccgtttccgtccatatcttgacgtaggtggagtcattgggaatggtggttgtcagcctgcttccgaatctccgggcttccacaccgcccaggccgatcccctcgccgaacggtctgttcctgagatactccgccagctttttctggttctgctttcttaccagataggacgcgtctttattgggacggaatgccgtgcgcatgcgccgtatcatgtagttgctttctcccacgtatgtaaatgcgaagaaaacatagatgcaaattcctcccactgcggcagcgctcatcagtttgatgttcttgctgataagcgcaaaaagcaacagactgcccaggggcactacgatagctcctcgggtacctgtaatgaacatcgagtataatgagagtgcggagatggaaaagtaatatactttcaggctggacttcttgctgaacaagccggcaataccgaacagcgcgcaggtgaatcccatgttggaaccgtaattccccgcatcggtaaagatggagaagtagcgggtgatctggggcagcaagtgcgtcttgtacatgccgctttccatcatggcattgtattcgacggcgtcgaaaccgatgaatttctggcagaggcctttcagtatggcgatgagcgtaagtatggagaacaggaatatcagccggctgatttgtttataggatgttgccagcagcaccgtgattagagacacgagaaacgtattgtaaatgaatcccctggaataaatccatgcttccagggatgcggtggggttgacgacttccataaggcagtacaccgccagtacggcaccccctatggtgagaatgttgacggcctgtttccagggaaaacggtagtgcagcgccgtctggacgatgacgatgagaagcacgctccaccagatgatgtccgacagtatgctgagtccgtcctgccggctgtaacgcgccaatggggtgaagaaataattgaaaatgaatagcaggaataggaagcgttccggtttgcgaagatgaaaaatcagaatacacaagagggcgggcagtgccgccaccagtcctgctatcgctaaattttgctttaaagtagctgcgacgatacatcctaaaccgatgcagagtatggcaaaggttaaggcgggagatgatatgtaacttcgcttgatactcattttacagcagcttttttagcggtcagtcccagttgggacaatcggctgacgaagctgtggagaggtgtcttgggcggtaattcgccggtgaacgattccacgacttcacggtcggcattgttgagataaagcgataacggagtgtcacccagcatttctttgatggatttcaggttgatatcatcgtttttgccccataaacggcaggcgttggctatgagcaggttgacatcggcttgtttcagtacggtcaaaggcaggctggcagtgcttatggacgggtattccacaagaatgatgtccggtatctgctcggcggagttcagttgccagaaatcggatagttgttgtgcccggacgtatttcttgtcgttggtctcaaaatcgacatcatgttttacgatacgggtgcgaagtcccacggaagcccaatggtcggcaaaatatttggccagaaaacttttaccttcccgctcttccatactgagcaggttgatgacggtagggcgtcctgttgccagatacctgtcgagctgatggcaggaataggcggcggcacggcggttgcatactttcaggaatcctcggaacttcaggttgctgataccgttgaatgcggcgatgacgggcaggccgctaaggcggtgactgcgttcggcatcccgtagcgtgcggtctgtcagttcaatgatgaggaagtagaaagtaatgaatatcaaactgccaatcagagcagccacgacgtagagcaggcgcttacggccgttgtcggtaagcgggaactcgggtggagcgatgatttgcaggttggcagtggtcatttttatgttctgcaggcggagccgcgcttcggacagtccgcggagctgttcacggtaggtgtcttcggctatgccgatggcacgctccttacgttttacttgagtacccactggagcaaattcccgatattggttcaggatgtcgttccggcgttcctgaaggactttcagttcggcctttgtctttgcctcgttgatacatgccatcagccattctgttaccatattatcgataccgacaccctctttggtgaaattgtattcgttgaggttgtctgaaatctggctgattctattttccgagtttcgcaaatcggtcctgttctgtcgcaactgttcgttgtcttttagttccgtatccgttgaaaagatttcctgctccaggatattctggttcagttccgtaactttttcaagttctttgagcagcttcgtgttatcgcgtataatcttggcgcggatgtccattttatcttccagcatccgacggagagccacggcacttttgtaggttcgttgggcaagttcctcacggtcgtccaaattgtatttggttaccgccagctctttactctgattgtcgtagttgattaccgaatgctctacattatagtgcatcaggttgtcttcttctttgttgaggttggttttggcaagtcttacttgctcctcaaagtaagcgatggcactgttcgtggcgctgaaacggagtatttcgtatgctttgataagttcgtcctctaaaatcttgatggtgttttgggtgatacccgggtcgggacttgtgtaggtgaaacttatcaggtcacttgtgcccagacgtttcacggttatctgctcgagtgcgtggaaactgtaaaactccgtaggacggctgaacatggagtatacaaagttggcggcactttcctgacggtatgcttgcaggttcccgacggttttgtccaacgaggaacggtctaccaaagccagcacttctttgggtgtatgctgcaggagttggcggtagtgctttgcctggatgtacatattatcctgccactcctcgccatatacaaggttcgtggcaagcaagcggagagagaccttctccaatgtgcttttggacttggctatgttgatgagattgtcgaaagtgctgctgatgttttcaatcttactgccgtcaatattggtaacattggttacaccggcatagatattactgtttacagtatagctgaacggcaggaactgggtgaagtacgccaccagtgctgtgacaataaatccaccccacaacagccagtaacggatgcggtagaagaattgtgctataaactgtattatatccataagattttatttccctttgattatttttacatttgtcagcatctcaagtaaaatgatggcgttatgcagcgaaacgcgtgcttcggcataggaagtcaccgctccggaacggcgcgcccgctccagtgaaagagagatgatgtctattttaccttgtataaaattgttctccgagattttcatctgagcgttgtagagggcggcattctccgctttggctttgatggttgccagttgcgccgtcacattgttatatgcttccagcactttgagccgccgttcttccattacttcttcctgcgtgtattgaagctgctcgatgttgtaacgatagttcttcagccggagcggacggttgaataaatcgccgagacctacactgaagctggctcctacgttgaaggtgtaccgggaactggctgtggtggactgataccagtcgttgtaggaatcgctgttgtcgttcaatacgttgtaacgcccgtatgcataatttccgttcagccggaagtagttccaccagtttcttttttctatgcggtattggttcttaacctgctctacctgggagtgtgcccgctttacagtggcgttttctatggcggcatccataaatacggaaaggggcggcagatcaaaaccttcgatatagtgttgcgtttccggtagctggcttcctgagatactcttctccagaatggcatcgctttctttcagtgcctccagaattttgatgcgctcttcacgggtcatgtccgtctgggcatggatggactggggcaacaggaacagaataaatgtagctgtacagagatatgataggggatgtgtatgggcttttatcatttgtctgtttgtttttttagttttaatacttacacgttctctttctgtacaaaagcggtgaacgtttttagaagtatcttcatgtccagccggaaacagaattcttgtgcatatttaatatccagttgctttcgttcttccgccgacatcttaccggctccgccacgcttttccacttgccagagcccggtcagtccggaaggagccatgaagcggtctatgtatgcgtcgctggtcagcagttcggcctcatagagcggaagcggacggttgcctacgatgctcatatcgcctttcaggacgttgaatagttgcggaagttcgtcaatgctgtatttacggatgaaacggccgatgcgtgtgacgcgcggatcgttttctatcttgacaaacgggctttctttggattgggccttttgccggaaaaaatctttttccggtatgatgaagtcatcagaaatcagtaagttagcttcttcatcggaagagcctgtaaggtcgtcgaaccggatgtcgggggtatcgcctgccgcttcttcttccattttgtactggttgagggcattgagttccttcagcttcttgtccgcattggtgtacatggagcggaacttcaggaagttgaatatccggtagttactgcctacacgttgcgacttatagatgactttacccttactttcgagacggatggcaatggcagtgccgataagtaacggagatagtattatcagggcgcatatggcaaataaaatgtcgaacgcacgtttccatgcgggcagatgaaatgtgttaagcatctttcggtggctttggctgaattcctgcattttatgcttttgacgcacttgcaggaactgagtcattcggtggatgctcgtttcatcggcttgtggcggcagtgtattattgacgcctgcctgcagataggttttgcgggcttctgccggcaatccttcggtgataagtattatgtatacgcgtggaaacctcttgtggaggcaggtgatgtcaaggcaatccttttctgtgtcggtttgctcgtaaaggatggatgtgttataccgttcgcggatgccgtctatgattttggcagctttacgggcaccggagacagtaacgaacatgccattggtaaccttgctcaggtggtcgatggcagtctggctgtttcctatgtagatataatatagcatatcttcctttcagttctttttcagatgtatttcttgatgcgtgccctgagttccaacgggttgaatggcttgagtatgtaatctgctgctccggcttcgagcaactggatgcgttcgacggtactttcctcactggagagcatcactacggggatatgtttgaacagctcgttccctttcagatagtacaggaattcattgccgcgcatgtggggcatgtgaatgtcggagatgataaggtcgggaacattgccttcgttaagccactcaagagcctttagagggctttcaaaatattccaggtcgtattctgtccctaaataaatcttaagtacgcggcctatggtggctttgtcatcaaccagtaagatttttttcattgttctgtttattatagcgttgttgctttgtttgtttactatgcagtaataaaaaaactgttgttttattgaactcgcccgattactgacgacaatgaatatttgctaacctgctttaacgcaaaatgagaaaaaacgtgagaatatgtttgccggtgtatttcttcacgtttttcgggttgccgtatagattggccatatttcagtctctattgagcggagtcaaattttcaataggatatacgtctttgttgtgtgactgataccagttgttgtcttgttgtccgccggtggtaatccacgaccggaacttgtcatataccatagtgacgtttctgttctcaaaaggccatgcaaattcttgagggattacaacagcccaggcaaggttttctttgctgagatagtatctgttttcggcaacggatgagtcgtcattaccgctattgaagtaatgagtaccgcccaagtctgtcggagcaaagcccgctacgtgtacttccgtacgcctcctttgggttgtggcgggagctgtgatggcgaaaatatcaatattgttgatgttcaggtcttccggctttacattggcggagacgggaaattccatgatgatgttatattccttggtatcttttttgaacggaccgttttcaagggtgttgatacgcttttcggtatcggtatactgacttccccacaattcggtgcatgcatcactgaagaggagataagtggggatgctttgcttattctcgaatgatacgtcttttccattggttctgaacttgtcgggcttcatagcttgagagagtttagtgaagcggataccggcccccaatgtcttggctgcacctgcggctcgcagttcaagagtcattctgaggcgtgtcactataccgtttttatctacttgcagtttttttccggacattacgattacaaggtcgttcatgtcaaaatcgccatatgcaggccaattgtcctcaaaagcaaacgtatacacgtcgctgtctttgatttcgatggggaagtcggggtctttctcttcttcacccttattgccttcgtcatagattccgccgcaagtctcgatggtgtatttggattcatcataaccggtattgacgctttcgttcttcttaaacgggtgatacaggctcagaccctctatttttccttctatgaccagattgttgcttaataattggacgttggtgggctcttcgaatttaattttttcggccttaatcattgacttgtcattgttggtgacattcactgcctggaaaatgacgtcaccgcgttttacttcgaactctctggctttaatcatggagccgtctatcagcgtgaatttggagtcggtcaggctttctatttcgggtacaggcagccactctgtgtcagtttcgttggcacggccggcggtaatggcccccttgtttaatgttacgtttctgaacttgaattctttttttacaataacggtgcaactgttgtataggacatcggatgatgagtttgtaaatttagatgtttcgatgaagccatcgttgtacacagacaggccaccctctatttcatagccgcttatccgggcctcataatggttgatgatgacggttgcggtggagttgttggttcttgtcttaccgtcagtttcatcgaatctgacactgccgtaattgaatagcctgccaccattgagttttatattcgtagcactgtttaagtcggtcttattcaaaatcctggcatcgatgaagttgagttcatgagcgtttaatgtgccgtgattgatgacgttgctgccgttgatggtgattttgtcggcgacttcgatttttcctgcgttgaatagttccggttgcttgccaagattcattgtcaggcttccattggttgaaattgtaccgaaattcttggtaggacatcctaaactgagagaagtgcattcgaggctgccgtcatgttgcagggtaagggtgttttcattaccgatggtgagattatttgcaatgattctgcctccacccattacatatatatcgaggtttgaattaaggctgctccaaccgcttaatttccagacgccctgtacgaatacagttgctctgccgctgtttgtttttagctggatggtataaggagaatccgatgtgtattcttttcctatgatatacttcgctccgttggcaagtgtgcctgtattccaagggtcaatgtaaccatccgatacacttggaacggctggtatcacttccgcttccttatattttttatcggcgatttccgttatgccggctgcctgtgccgcttcgaatgccgagtgggaattaccggcagtcttgtttgcggctcttgttcttgtaccggttgaaacattgtacagtttgcattccaatatacctccgttttcagggatactgtattcgtatacttctttgcgttgcttgggatcggtttgacggataaacagtcttgttgcggctttggagacgttgatttccgcgttgtaatttccgttcttgttggcagtacccaccgcaatggggacagcgcttatgtcggatatcgggttggcggtaaagatttcaataagatacttatatcgcccgtcaaattcatcgtttatctcaacattcagatttacggtgttgaccatggaccagtcaaaaccatcgggggcggtaaagtcttctcctaagggattttctttcggttttgtctgaatgcccctttcaggatcgtacacatcatccgtacaactggaaagtgccaaagtgctgacaatggctaccacaactgaaaaacggtagaataattccataggctgatttataatgtttttatgttttgtttgcttgttgaataaaataatcaacttttaattgaatatgccgcaaagatagccataatattcggattgttacttgtaaatattgtcttttttgataatgcaaggcgaatattttgctgaatccgaccatttgcccgttttgaaaacttgtaaatattgtccggagcgaataaaaaggagaagtctgaaagggagtaaagaggaaaaaaaagaggaaattactctttggtaatttcccctgccaaatccgaattcatccggcgacggatttccgcctggctcagtccgtgcccgagcaggaacatgagtttggtaacagcgcattcgggcgtactgtcgtagccgctgataacgccagcttcgagcagatgcagtccggtttcgtagcgtcccatctcaacaccgccgctttggcattgggtaatgttgacaatgacgatgcctcgttctgttgcgtccttcagttgccggatgaaccagtccttttgcggtgcattgccggaaccgaatgtcttgagaaccactgctttcaatcccggaacgtgaagtacagaatcgatgatgctttcctgaatacccggaaacagggtgaggactacgacattggtgtcgaaaagataatgcggcttcatcggtcgtgcagggtcggggcgacggatgatgtgttcgttgtaacggatatggattcctgcttttgccagagcggggtaattgaaagagcggaaagcgttgaaattttcggcattgattttggtagtccggttgccgcgcatcagctcattttcaaagaagatgcacacttcggggacaagggctgtaccgtccggacgtttggcggcagctatttcgatggaagtaatcagattttcttttccgtccgtacgcaatgtcccgatgggtagctgcgaaccggtaaggataaccggtttcgcaaggttttcgagcatgaagctgagtgccgatgccgtatatgccatagtgtcggttccgtgcaggatgacaaagccgtcaaagttttcgtagttgtcatttataattgcgacaattttggcccacagggaaggttccatgtcagaggagtcgataggcggatcgaactgataggacgagatgtgatagttgaagcgcttcaattcgggaacatgcttgagcaggtgggcgaaattgaaattttccagtgcacctgtttccggattttctatcattccgatagttccgcccgtgtaaatcaagagaacggaaggataatctgctttcataaatatctcttttttctttttttcgggcacaaagataatgtaaaccgataacagaataaaatgaacttgtccatttttttatgttgaaatgtagcttatcttcgtattattcacagagatacgcaaaaaaatggaattttagttgtcttactgtcctaccgctttaccgcttttacccaaatcttctttcagatgtgagatggctttttgtgcgtttcctttgtattcgtcgagcagggtaacgaagcggcttccgataatggctccggacgcatgggagcaggctgtatcgaacgtctgccggttactgatgccgaaacctaccatgcgtggattacgcaggttcatatcttgaatcttcttgaaatagacttgtttccgggcgtcgaaatctttctgcgcgccggtggtggctgctgatgataccatatagatgaatccgtcggtatgggcatctatttcgcggatgcgtttctcgctggtttcgggggtgatgagcatgatgacccggatgtcgtatttctgtgcgacggccttataattttcttcgtattccctgaaaggcaggtcggggatgattacgccgtcaatgccgcattccgtacatttccggcagaaagcctcaaagccgaagtgcataatcgggttgagatagcccattaatatcaacgggatacggacatcccggcggatgtcctgcaactgctcaaagaggatgcggagagacattccgttgcgcagggcgcgggtggcggcatcttgaatgacgatgccgtctgccatcggatcgctgaagggaatgccgatttctaccatattcactccgttcttttcgagtgtacggattacatcggctgtgctgttgagcgtggggaagccggcacaaaagtagacagacagcaggtttttggggctgtcttggaagagttggttgatacgattcatagtgagtttgttattacagatttattgttgacagttacgttatctgccggtcggcggttatgccgtcagccggcagtttcaccggttcttattgcctggaggaattttccgatgcgttctacatctttgtttcccggagccatctcaaagcggctgttgatgtcgatgccagctagtttggggtgatgaaactccctgatggctttaacgctgtaagggttgattccgccgctgagcagaaaaggcgtcattccgctgtaacggtgcagcaggttccagtcgaactggttgccggagccgccatacagtgatgtcttggcatcaaagaggtaataatcgcataatcctttgtaagcggaaacggttgccaggtcttttgactgtgaaatggaaaatgccttgatgaggtgcagaccgctgctgcgtaaggaacggcaatatccgggcgactcgctgccatgaagctggatgtagtccagtgcaaaacggtcggcgtacatcaggatggtttccttgctttcattgacgaagactcccacgcgctttgcacgaaccggaagatatgccggtatctcgcacaggcaacggggagagttgggatagaagataaagcctatcatatctacatccagttgttctacattgcggatgttttccgcttcggtcatgccacatactttgatgataagaggagccattttctttaatgatttatgtaattaatactttattttcaggaacagagtggagaaatgaaatcttttaatgcatcttccggccgatgggttttcataaaggtttctccgataaggaagccgcggaagcctgcagcgcgcagccggcaaatggtttcgggatgtgaaattccgctttccgaaacaagtagcggcaggctttggatgtcggaagaatccagggctgtggccggtatctgccggagtttttcggctatatggaaagagtttttcacatcggtgacgaatgtgccgagattacggttgttgacgcctaccatatccacatccgcgtttacataagcgagttcggaaaaagtgtggatttcgagtaacacttccaatcccagggcatgtgcccgggcagtgagggtggcacattcttcttgtgtcaggcaagcggcgataagcaatactgcatcagctcctacgatacgtgcctggagcagttggtattcgtcgatgatgaaatcctttcgcaagataggaatgccgagcagtgggcgtgccatgcgtatatcctgcagcgaaccgccaaagaatttttcgtccgtaaggatagagactgcggaagcaccggctgtttcgtatgcagcgggtatttcttcggcacgggcagtctcgtgtatccatcctttcgaaggagaacggcgtttgaattcggcaatgattcccgtgggggaagaagcaagcgcctgtttcatgctgcggacgggtatggtgacggaagttccggtagtggcgtctttctgcatcatggcggcaacctcttcctgtaacttttcgagggagacggcttgcttttgcagttctatttcaattcgtttatgagcgatgatttccgataaaatatctgtcatggctgttttagtgaagagttacgggatatgcggctatagataccttttcgcacctcatcccttactggttaatttctataaattttttcaatgttttcagcgcccgtccgctttccagcgattcgcgggctatggcaatacactcttcaatctccttttccggttccatgacctgaatggcgaaggcggcattgacaataacacattgagtttgggcggcttctgcgcggttgttcaggatattgtcgaagatacgtgccgcatcttccttgcaggctccgccggaaagttcttcgggacgtactgcgctgaaaccgagagtttgtgggcgatagatgcgttcataatgacgtgtcatcactttgaattcatcggtcagtgagatttcatcgtaattgtccagactattgactacggcaaagtcgatgccgagtctgtagaaaacgttcgtatagagacgcatttgtgcgaggtcggctacgcccaatagctgataggcgggctgacacgggtttaccagcggtcccagcaagttgaacagtgtgcgtactcccaaggctttgcggacaggacctacgaatttcatggctggattgaacagttgggcgtgcaggtaggctatgttacactcttccatgcttcgcttcaatatgtcgggattgttggtgaagcgcacgccatgctgttctattacgttgcttgctccactgacggaagtagcgccgtagttgccatgtttggctactttataacctgctcccgccacaacgaaactggcgcaggtggagatgttgaaggtgttcttcccgtcaccgcctgtacctacgatatcaatggggcggtaaggcgcaaagtctatcggaattcgtgtctccataagtgcttcgcgaaagcctgccagctcgtctactgtgatgctgcgcatctgaaaaaccgtgagcagtgcggcaatctgtgcttcgggatacatctcccggctgatgttgagcaggatttgtttactttcttctacagtgagttcttcatggttgaagagccgggttaatattgttttcatctgattaagtttgtggtttaaaaataggttattcttccagccagttcttcataatctgcttcccgtccggggtaagcacggattccggatgaaactgtatgcctcggacatcatattcccgatgtttcaacgccataatctgcccttcgggactgacagctgtaacggcaagcgtttcgggcagtttttcagtatctactacccaggagtgatagcgtcctacggctatttcttcgggtaatccccggaaaatgtaatccggttctgtcagccgtataatggtctgtacaccatgaaacactgtgctgaggttgactaacttcccaccgaatgcctgtccgatggcttgttctcccaggcatacgcccagtattggtttcttgcctgcgtaggtgcgtattacatccagcagtaatcctgcttcttcgggcacaccgggacccggtgaaaggatgattttatcatattgttccaattcttctatgctgaattggtcattgcgcagtacatctaccgctacaccgagttctttcaccaagtgcgcaaggttataggtgaaggagtcataattgtctatgattactaccattgttattaactgtttgattaatttacttttgatactcttgttgatttatacaattggccgattttctgttttacagggaattttccgccatggtaattgccttcttcaatgctcccagtttgttgttcacctcttgcagctcgtattcggcattacttttggctacgatgccgccgcctgcctgaaaccataacatcccgttgcggctgacgaatgtacggatggtgatagcctggttcaggctgccgttcaggccgatgaatccgatacagccaccgtatgcgccacggttatgcggctccagttcgctgataagctgcatggcgcgaactttcggtgcgccgctcaaggttccggccgggaaggtatcgataaatgtcctgatagagtctgtatcactgttcagcgtaccgctgacgcggctcacgaggtgaatgacgtgactgtaatattgcatctctttgtaaaagtccacttttacgtcatggcagttgcggctgaggtcattgcgggcaaggtctaccagcatcacatgctctgcattttccttgggatcgtcttgcaggtaccgggcatttgcagcatcctgttccggatttccggtacgcttggcagtgccggcgatgggatctatataggcatggcggccttcaatgcggcagtgcgtttcgggagaagagccgaagatacggaagccgccgaaatcaaagtaaaacagatatggagatgggttgatgctgcgcaaagcacggtaaagcttgaagtcgtcgcctacgaaacgttgttcgaaacggcgggagaggactatttggaaaacatctccccgcatgcagtgggctattcctcggcggatattggctttgtgttcctcatcggtcagtgaagaagtggtttcgccaacagcacggaagtcataggctgtgtagttgcggttgtgaatggctttctgcaccttgtccagttcgctcttctcatcgggagcgagcatttccagtaacagcatttcatttttgaagtcattaaagacgataagatacttatataatatgtatagtatatccggtgcatcgttggtggcttcgcgactgtcttttacggcgatgttctcaaaatagcgtacagcattgaaagatgtgtaaccgtacaggccgcaatagtcgctgtattctccttccacgtgaaagcggttgaggaaatcgcgtaacgcattttccgcatggtattcttcggtaacgggatgttcctcacgtgtgccgtcgggcagacagaacacggcaacagcgtggtctatactgacgcttgctaccggacaaagtccgatgaatgagcggttgttttcactgccatgatagtcggaactctccatgagtgcactttgaggaaaaatgtcgcgcaccttcagatacgtgcttacgggtgtatgtaagtcgccgagcatcgtgcggctcactgtctgataatcatacttcatattttgtattttattctttatacatcaaatacgtttctacatccttatccccccgtcccgaaacggtcagtaccaccacatcatcggttttgaagttcagcttcttcaatgcaccgagggcgtgggcgctttccaatgcggggatgatgccttcgagcttagtcagttcgtaggcggcgcggatggcctcgtcgtcatttacggagagaatgatggcgcgcttttgtgcggcaaggttggcatgcatggggccgatgcccggataatccagtccggcggagatggagtaaggctcttcaatctgcccatcctcgttttggataacgtaggtgcgtgctccatggataatgctcaatttgcctaaggcaatggtagcggcagtcattcctgtttctatccctttgcctccggcttcggcaaggacaatctgtacctggcggtcgtccacatagtggtaaatggttccggcagcattgcttccaccgcctacgcaggctatgagatagtccggagactcgcgtccttctttttccatgagctgttttttgatttcctcgctgataaccgattgcaggcgtgccaccatatcggggtaggggtgcggacctacggtggagccgatgatgtagtaggtgtcggcggggtggcagcaccagtcgcgtatggcttcgttggtggcatcctttaaggtcatgtttccgctggtcacgggcactacggttgcacccagcatcttcatcttctctacgttgacgtgctggcgttccacatcggtcttgcccatatatacgatgcactccatattcatcaatgcacatacggtggctgtggcaacgccgtgctgtccggcacctgtttcggctatgatgcggcgtttgcccatacggcgtgccagcagaatctgcccgatggtattgttgattttgtgtgcgccggtatgattcaggtcttcccgtttcaggtaaatccggcaaccgtacttttccgacagacgccgtgcctggtagagcggtgagggacgtcctacgtagtcgcgcagcaaccggtcgtattcctgcttgaaatctttactttgcaggactgcgagataggttttctgcaattcctctacacacctgtggagtatttcgggaacgtatgctccgccgaattctccgtaataaccttctttgtcaactaagaaactaaccatattgttttattatttaattgttggctgccagttaccggttgcgaactgttagctatatacatcgtttaaataaaagagccccgtcgcttggtgcgacagggctctttttatatctatattgtacatatatacatacgagcactgctcccttacgactgccggagttgtaacggatgccaccaccaatatgtatttacgaacattgttttcattatcttttttatttttgaccgaggcaaatataagcacattgttttaataatcaaagcaaatctttcttttttttcttatgagaacttttttcttaaagttttgttgtttatggcggatactattatttactataaaaaagaaaggaacggactatgaaacggaaacatctgattactataggtgtgattattgccattgttttattattgtattggctttttatagccgaagacttgaatgcctggctcaatgtaaattgatttttcagtattatcatgcgaggttgttcggataaataatgtatcttcgcaaaaaatcaaaaactcatgaaaggattaagttattcgtttttgcgcgctgtgtgtgcgctggtaatcggtttggtgctggtgatgtttcccaatcaggccggtgattattttgtgataacgattggcgtcattttccttgtgccttcgcttattagtattataggatattatgctcaaaatgcagaagtgcgccgccgtttccctatcgaggggataggaagcctgttatttggactatggctggttattatgccgggcttttttgccgatttgctgacgttcgtgctgggctttatcctcgtgatgggtggtgtgcagcagatagcctcgctgtcggctgcccgcagatggacgcctgtgccgggcggattctacgttgttccggtggctatattgctggccgggctggttgcgctgttcaatcctacgggcgtgcgttctacggcgtttatcattatcggaatcaccagtttggtctatgcggtttcggaattgataaactggttcaaatttacccgtcttcgtcctaaagcacctgttaccggcagcaagagtgatgatgacatcgaagatgcaaagataatagaatgatgtatatgttttagacaatatactctctgttacataaaacgcagcaaagcatctattccctgatgaaagatgctttgttgcgttttgtatgacaataccgggtagcttgtcactctgaaatgtttttagaaattttccgtaagtattcctctatttcttgagctgtaacatctttcaacaatacagttttatttttattcaatagatataaggtcgggatagcttttaagtcgtaaaggctttttagttcgattgcttgttctttgtcgtaagcattaatccattctgcaggaaaatcggagaggtgtctccgccattcttctaaatcaatatcggggtaaatggaaaggactttcatctggttctgtacgatagcttggcagatggaagggctttgtttcaatgtttctatcgtttcgctgcaggcatgacagccgggattattgatgaataatagggtatagggagcctttatgctatacaaattgccttgtctgccattggcaagcgtatagacaaaatccaatgctttagttcctattctatttttttgtgccagctcgcgtcgggctttgggacgtattttttctgtattatccataacaggagattgcaacatggcatctaaaacagatatgtatagttcttcattacgcatcggtgagttgggatcgtacaggtacttgtctgcaagagaagtcagatatgtatagcactttttctctttttcagcttgtgtaaataaagttttcaaagcaatatccctcgtttgagcaggtatcagttgtaatatatcaataaaattcacccaagcctgctccgtcacttcggggtgatgtatgtagttggtatcggcaaagtttacatgctcccaatagtgacgtgccagatagtcggcgcgtaattcgggagtgttcaacattgtgggtacttcggggtatacgaaagttgtaatagtatctgttacagtgtcttccgtctgcttattatttgcttgcccattactacatgcactgtttgaacttaataggaaaataaataatgtgtaagctggtaacaattctatgatctttttgtatttcatattatctaaaatagatgtaaaattaggtactgtctcattttttttactcgaaaagaaaagggtcatttttctctatccaataaattatttttagaatttgagtttcaagtaataacgtattacgtaaaattaaaagaaatatggtgcaagttatcaagaaaatcttgcacttgcaagaaagaagactaaattctgatttgaaaattaagtcttttgttagttattcacttttcctatgcttactgcacattgtcagtttctacttttctgttctgtcctgttagcctttatcttgtgtccgacacccgggtgtcgaacgtgccgagacccggatgtcgaacatgccgagacccgggtgttgaacatgtcaagacccgggtgtcatgcaatgcccttccgtatctccgtgttttctttccgccttccgttgttcctttccgctcgcatgcgcatatattataatgtgtcccttttgcctggctttccatcctccttaaaaaatatgttcttcaacacatttgtcaatcagcgttttataaaaatgttcaagagaaacgcgaaaaaatcccctgatatatttggtgtgtatgttataaagttctacttttgcacccgctttcgagaacgggagcagcgatgttttgacattctgacaggaacggcgtaggaactcttacatatttcttctgcttggggcttgtttctttctggaatcttccctttgaaaaagcagaatgaaaaaaacttccggaaatatttggaagatatgaaataaagttcttacctttgcacccgctttcaaaaagtaagcagcgttggttgacactttttcttgaatccgggtcggtaaaacaatctttcttttgttctccctttcgcaagagagatgacgggaaaaaggaaagatgaaaaaaaacttccgaaaatatttggaagatatacttaaaagtttttacctttgcatccgctttcctgaaaagaaagccgacataaaagaagcgatctttgaagagatttacataaacaatacaagtagtacaagagcaagacttgtttctgaaaaagaaacggtcttgggtaaaataaaaagaaccgtcattacttattaaataggtaatagatactttttaaattcgagcgtcctgaacagagcaacaaccgttcctttatggaatgattaacaatacttttacaatgaagagtttgatcctggctcaggatgaacgctagctacaggcttaacacatgcaagtcgaggggcagcatcatcaaagcttgctttgatggatggcgaccggcgcacgggtgagtaacacgtatccaacctgccgacaacactgggatagcctttcgaaagaaagattaataccggatggcatagttttcccgcatgggataattattaaagaatttcggttgtcgatggggatgcgttccattaggcagttggcggggtaacggcccaccaaaccaacgatggataggggttctgagaggaaggtcccccacattggaactgagacacggtccaaactcctacgggaggcagcagtgaggaatattggtcaatggacgagagtctgaaccagccaagtagcgtgaaggatgactgccctatgggttgtaaacttcttttatacgggaataaagtgagccacgtgtggctttttgtatgtaccgtatgaataaggatcggctaactccgtgccagcagccgcggtaatacggaggatccgagcgttatccggatttattgggtttaaagggagcgtaggcgggttgttaagtcagttgtgaaagtttgcggctcaaccgtaaaattgcagttgatactggcgaccttgagtgcaacagaggtaggcggaattcgtggtgtagcggtgaaatgcttagatatcacgaagaactccgattgcgaaggcagcttactggattgtaactgacgctgatgctcgaaagtgtgggtatcaaacaggattagataccctggtagtccacacagtaaacgatgaatactcgctgttggcgatatacagtcagcggccaagcgaaagcattaagtattccacctggggagtacgccggcaacggtgaaactcaaaggaattgacgggggcccgcacaagcggaggaacatgtggtttaattcgatgatacgcgaggaaccttacccgggcttaaattgcaactgactgaatcggaaacggttctttcttcggacagttgtgaaggtgctgcatggttgtcgtcagctcgtgccgtgaggtgtcggcttaagtgccataacgagcgcaacccttacgggtagttaccatcaggttatgctggggactctacccggactgccgtcgtaagatgtgaggaaggtggggatgacgtcaaatcagcacggcccttacgtccggggctacacacgtgttacaatggggggtacagaaggcagctacacggcgacgtggtgctaatcccaaaagcctctctcagttcggattggagtctgcaacccgactccatgaagctggattcgctagtaatcgcgcatcagccacggcgcggtgaatacgttcccgggccttgtacacaccgcccgtcaagccatgaaagccgggggtacctgaagtacgtaaccgcgaggagcgtcctagggtaaaactggtgattggggctaagtcgtaacaaggtagccgtaccggaaggtgcggctggaacacctcctttctggagcgacgctcagaaaaagacgaaaagttggttctaaagagattacctccataagaacctcttgtactgcgaagattgtttattaataatataaagagaaagtagaagccgagccttcgggctagggtttgactgacagtcctatagctcagttggttagagcgctacactgataatgtagaggtcggcagttcaactctgcctgggactacgacatagtcttggtgagagacacggacgattttaattactaattctaattactaattaccaatcactgaccgtctattactaaccactatctcgggggattagctcagctggctagagcacctgctttgcacgcagggggtcaacggttcgaatccgttattctccactcttgagattccgttaaatcggaatattctcaaacgatctttgacatgatgtaacagaaaaaagtaaagttaaagctgaaagtatatatcgaccatacgttgtcggtaagactaaaagtaagcaagggcgcatggcggatgccttggctctcggaggcgatgaaggacgtgataagctgcgataagcttcgggtaggtgcaaataacctttgatccggagatttccgaatgggacaacccgattggttgaaggccaatcatccaaccaagttggaggctaacgcagggaactgaaacatcttagtacctgcaggaaaagaaaataaataatgattcccctagtagtggcgagcgaacggggaccagcccaaaccacctatgttacggcatatgtggggttgtaggaccacgttgtggcaagaaaactggtgagtagaatgttctggaaagttcaaccatagagcatgatagttgcgtatacgaagccagtcgaagcctagtggtatcctgagtagcgcggagcacgaggaattctgcgtgaaccagccgggaccatccggtaaggctaaatactcccgagagaccgatagtgaaccagtactgtgaaggaaaggtgaaaagcacttcgaacagaagagtgaaatagttcctgaaaccatgcgcctacaagcggtcggagctcttacgagtgacggcgtgccttttgcataatgaacctacgagttactttttccggcaaggttaagggtcttgagacctgcagccgaagcgaaagcgagtcttaacagggcgttcagtcggaaggagtagacgcgaaaccaagtgatctacccttgggcaggttgaaggatgggtaacaccatctggaggaccgaaccaataagcgttgaaaagcttctggatgacctgagggtgggggtgaaaggctaatcaaacttggagatagctcgtactccccgaaatgcatttaggtgcagccttgacttatactggcatgaggtagagcgactgataagatgcgagggcttcaccgcctatcaagtcttgacaaactccgaatgcgtgtcagttctatgtcaggagtgagggcatgggtgctaaggtccatgtcctaaaggagaacaatccggaccaacagctaaggtcccaaaatgaatactaagttgaactaacgaagtcagattgctaagacagctaggatgttggcttggaagcagccattcatttaaagagtgcgtaacagctcactagtcgaggagtttggcgtggataataatcgggcatcaagtattctaccgaagctttgggatgtgtaaacatcggtaggggagcattccactcagcgttgaaggtgaggcgtgagccttgctggagcgtgtggaaaagcaaatgtaggtataagtaacgataaagggggtgagaaaccccctcgccgaaagactaaggtttcctgatcaacgctaatcggatcagggttagtcgggtcctaaggctcagccgaacggcgaggccgatggcagaaccggttaatattccggtactacctcaaggagtgacgtggagacggagcagtgacagtgccgcggactgacggaatagtccgttaaagggtgtagatgttgattcctgcaggcaaatccgcaggaagagtcgaacctgatagtatggagcgtccttcgggacaatccaatagtgcacgtaaacatactcccgagaaaatccgctaaacttaatccttgtggtacccgtaccgcaaacggacacacgtagtcgggttgaatatactaaggcgcttgagtgattcacggttaaggaactaggcaaactgaccctgtaacttcgggataaagggtcctcagggtgacttgaggcgcagagaatcggtccaggcaactgtttaacaaaaacacagggctgtgcaaaatagaaatatgaagtatacagcctgacacctgcccggtgctggaaggttaagaggagatgtcatcgcaagagaagcattgaattgaagccccagtaaacggcggccgtaactataacggtcctaaggtagcgaaattccttgtcgggtaagttccgacctgcacgaatggtgtaatgatctggacgctgtctcaaccgtgagctcagtgaaattgtagtatcggtgaagatgccgattacccgcgatgggacgaaaagaccccgtgaacctttactatagcttaacattgaatttgggtaattgatgtgtaggataggccggaggctttgaagcaggtacgccagtatttgtggagccgctgttgaaatacggccctttgattatttgagttctaacccgcggctgcggggacactgtttggtgggtagtttgactggggtggtcgcctccaaaagcgtaacggaggcttctaaaggtgccctcacgacgattggtaaccgtcggcagagtgtaatggcataagggcgcttgactgggagactaacaagtcgatcaggtaggaaactagagcatagtgatccggtgtttctgtatggaaaggacatcgctcaaaggataaaaggtactccggggataacaggctgatccctcccaagagctcatatcgacggaggggtttggcacctcgatgtcggctcgtcacatcctggggctggagaaggtcccaagggttgggctgttcgcccattaaagtggcacgcgagctgggttcagaacgtcgtgagacagttcggtctctatctatcgtgggcgtatgaaatttgcgtggctctgacactagtacgagaggaccgtgttggactgacctctggtttaccggttgtgccgccaggtgcattgccgggtatctaagtcgggattggataagtgctgaaagcatctaagtacgaagccagccacaagattagatttcttagggtcgtcatagacgatgacgttgataggatgcaggtgtacaggcagcgatgtcatagccgagcattactaattgcccgttcacttttggtcttgccatgtatgggtggtatatacgttcagtttaccggtttcattaccggttgttctttactttttacatcatgtctgccttattcaggtgactatagcactgaggttccacctcttcccattccgaacagagaagttaagctcagtcacgccgatggtactgcgtaacagtgggagagtaggtagtcgccgtttttagagagagaagcccctgtatcggaagatgcaggggctttcttgttttggggctatcattccgaacagagaagttaagttcatttgtctgccttgccttgttttgcttgcttttcttttcttttcttttctttgttttgcttgttttcttggggtcagcagatttttagtgcggattattcttatacttgtgaagtgttttttctttcttagtttttaggatattatatcgtatcgtctaaaagaatgctatgcatccgtttatttgcccctttcatctgtctattttccggttttactctttatttcttttttccttgttatcttattgttatctttacggaataaaactggtgaaaaacgatattttttatgaaaatgggttacttttattccattcttcttgtttaatatcaaatggtttttcgtaattttggcgtgaatctaataaggactgaaaaaaatcatgcaattaatattgtaataaatcatataataactcctgtaaaatatggaaaacaagattcaagagctaaccgataagatttaccgtgaaggggtggaaaaaggtaatgaagaagcccaaaaacttatcgtaaaagctcaggaagaagcccaaaaaatagtagagaatgcacagaaagaggcagactctattgtggctgctgctcgtaaatcagccgatgagctggcggagaataccaaatcagagttgaaactgtttgccggtcaggctgtgaacgccctgaaatctgaaattgccactttggtaacggataaaatcgtaaacgccgatgtgaaagcttttgccgcaaacaaagatttccttaacgctttcatcgtagcgctggcatccaaatggagtgtggacgaacctatcgtgatttccacatcggatgcggaaggcttgaaaaagtatttcaccgctcaggcaaaagaattattggataagggcgtgaagattgagcaggtgaatggaaacaagacactcttttctgtttcaccggccgacggctcttacaaagtgaacttcggcgaagaggaatttatgaactatttcaaagaattcctgcgtccgcaattagtggaaatgctgttttaattccccacaggattatgagtaaatactattacttggtagccggtttgccggaactcactttagaggatagcaaactgagctatacggtagctgatttcaagacggaattgtatccggctttgtctgaggatgataaaaggctgatagacttgttttatcttcagttcgacaatgcgaatgtcttgaaattattgaaaaacaaggacgctgcgattgatccgcggggaaactactcggcggaagaactgaccgagtatatctcgttgctgaaagaaggcggcgaggtatcggatcgcgtgtttccctcttacctttctgtctttatctccgaatatgtcaacttgtccgcagaagatggcttcttgcatgaagaccgtttggctgcgctttattatacctatgccatgaagtgcaaaaacaagtttgtatctgcttggttcggttttaatcttgtgattaacaatgtgctggttgcactgacggcgcgaaagtttaaaatggacgtggctcctctgatagtgggagatacggaagtttgtgaggctttgcgcacatccggggccagggacttcggactgggcggtgaagtagaatggctggagcaactggtgaaaatcagcgagacggaagaactggtggagcgggagaaaaagatagaccggttgcggtggaactggatggaagagactactttcttcgactatttcacagtggaacgtctgtttgtgttcctgttacagctcgaaatgatagaacgttggatttcgttggataaagaaaagggtagccaactgttccgcagcataattgctgcgttgaaggatgaagtacggatacccgcagaattcagataaaataaattacataattatatggcaacaaaaggaactgttagtggcgtaatagccaatatggtgaccctcgtagttgacggccccgtggcacagaacgagatttgttatatctcgaccggcggagaccgattgatggcggaggttattaaagtggtaggcactcaggtctatgtacaggtgtttgaaagcacccgtggactgaaggtgggagccgaagctgagtttaccggacacatgctcgaagtgacattgggtcccggtatgctttctaaaaactatgacggtctgcaaaacgacctcgataaaatggatggcgttttcctgaagcgcggacaatatacgtatccgttggataaggaaagcaaatggcattttgtgcctttggcaaaggcaggcgaccaagtggaagccgctgcatggctggggcaggtggatgaaaacttccagccgttgaaaatcatggttcctttcgggcagaaaggcgtatgtaccgtgaagtccatcgtaaaggaaggcgactacggcattgaggataccattgctgtcctgaccgacgaggaaggtaacgatgtaaaagtgaatatgattcagaaatggcccgtgaagcgagccatgacgaactataaagagaagccgcgtcctttcaaattgttggaaacgggtgtgcgtgtaatcgataccgtcaatccgattgtggagggtggtacgggatttatccccggcccgttcggtacgggtaagacagtgctccagcacgccatttccaaacaggcggaagccgatatcgtaatcatcgccgcctgcggtgaacgcgccaacgaggttgtggaaatctttacggaattccccgagctggtcgacccgcatacaggccgtaagctgatggagcgtaccattatcatcgccaatacgtccaacatgccggtggcagcccgtgaagcatctgtgtacacggccatgaccattgcggaatactatcgcagcatgggattgaaggtgttgctgatggccgactccacttcccgttgggcacaggcattgcgcgaaatgtccaaccgtatggaagagttgcccggtccggacgcgttcccgatggacttgtcttctatcatttccaacttctacggccgtgccggatacgtgaagctgaacaacggcgagacgggttccattaccttcatcggtactgtatcgcctgccggcggtaacttgaaagaacccgtaaccgaaaataccaagaaggtggcccgctgcttctacgccctcgaacaagaccgtgcggataagaagcgttatcctgccgtaaaccctatcgactcgtattccaaatatatcgagtatcccgaattcgaggattatataaccaagcgtatcaacggcgaatggattggcaaggtaaacgaagtcaagacccgtctgcaacgcggtaaggaaattgcggagcaaatcaacattctcggtgatgacggtgtccccgtggaatatcacgtaaccttctggaaatcggaactgattgacttcgttatcctgcaacaggatgctttcgacgagattgacgccgtaactcccatggaacgtcaggaagaaatcctgaacatggttatcgacatctgccatacggaatttgagttcgacaacttcaacgaggtaatggattacttcaagaaaatgattaacatctgcaagcagatgaactactcgaaattcaaatcggaagagtatgacaatttctacaaacagttgcaggaattgattgaagaacgtaaagcataaataataagatggcaacaaaagcatttcaaaaaatatatactaagattactcagattacgaaagccacgtgctcgctgaaagccacgggggtagggtatgatgagttggcaaccgtaaacggcaagctggcccaggtggtgaagattgccggtgacgatgtgactttgcaggttttcgagggtactgaaggtatccccaccaatgcagaggtggtgtttctgggcaaggctcctaccattaaagtgagcgaccagcttgccggacgtttcttcaacgctttcggcgatcctatcgacggcggtccgtccatcgaaggtcaggaagtggaaatcggcggtccgtccgtgaacccggtacgccgtaagcaaccgtccgaactgattgcaaccggtatcgcaggtatcgacctgaacaatacgttggtgtccggacagaagattccgttcttcgcggaccccgaccagcctttcaaccaggtgatggccaacgtagccctgcgtgcggaaactgataagattatcctcggcggtatgggtatgacgaacgacgactacctgtacttcaagaatgtattctccaatgccggtgcgctcgaccgtatcgtcagcttcatgaatactaccgagaatccccccgtggaacgtctgctgattccggatatggcgctgaccgctgccgaatactttgcggtgaacaacaatgaaaaggtattggtattgcttacagacatgacgtcctatgccgatgcgctggccatcgtgtccaaccgtatggatcagattccgtccaaagactccatgccgggttcgctttattcggatttggcgaagatttacgagaaggcggtgcagttccccagcggcggttctattacgattatcgccgtgactaccttgtccggcggcgatattacgcatgctgtgcccgataatacggggtatatcaccgaggggcagttgttccttcgccgtgacagtgacatcggtaaggttatcgtcgacccgttccgttcattgtctcgtctgaaacagctcgttaccggtaagaagacccgtaaggaccatccgcaggtgatgaatgccgccgtacgtctgtatgccgatgccgccaatgccaagacgaagctggagaacggtttcgacctgacgaactacgacgagcgtacgcttgcctttgccaaggactactccaaccagttgctggctatcgacgtaaacctcgacaccacggagatgctcgacgtagcctggagcttgttcggcaagtatttccgtccggaagaggtgaacatcaagaaagaacttgtggacgaattctggcccaaaacagaaaactaatcacttataattaaccattaatcactaacgaagtggctattaagtttcaatataataaaacgtcgctccagcagttggaaaagcaactgaaagtacgtgtgcgcacgctccccatcattaagaacaaggagagcgccctgcgtatggaagtgaagcgctgcaaggccgatgctgccgcgctggacgcgaggttggaaaaggaaatccaagcttatgaagccatgttcgccctttggaatgagtttgatgcctcattgataaaggtcagcgatgttcatcttggtgtgaagaagattgccggcgtaagagtgccgttgctcgagaatgtagatttcgagatacgcccttacagcttgttcaatgcgcccaaatggtatgcagacgggttgcatctgctcaaggaactggcacacacggccattgaacgggagtttaccgtggccaagttgaacttgctggaacatgcgcgtaaaaagaccacccaaaaggtgaatctttttgagaaagtacagattccgggctatcaggatgcactgcgcaaaatcaagcggtttatggaagacgaggagaacctctccaagtcgtcgcagaaaatcatgaagtcccaccaagagaaaaggaaggaggcagaagcatgattacgaaaatgaagaagctcacgttccttgtatattataaggagtacgaagcattcctgaacggtgtgcgcgacctcggtgtggtgcatgtggccgaaaagcagcaaggcgttgccgacaatacggagttgcaggacagtatccgtctgtctgcccgcctgcaggctacggaaaagctgttgcaggcgtttaagcccgccagactggcggtggaggaaacacccgcctcggcagcccgcggactggaagtgctgaacgaagtggacgagttgcaagccgaaaagaataagttgcaacagcagttgcagacctatcagaaggaaaaagctgcgctggagccatggggtaactttgaacccgcaagcctttcgcgtctgcacgatgccggactggcagtaggcttttacagttgctcggaaggcaattacgacgcaacctgggaagatacctataatgcgatggttatcagccgtcaggcctctcgcgtctatttcgttaccgtaaccggtagttcggaagaaacggatttggatgcggagcaggccaagctgccgccttactcattggagcgcgtacaagtgctttgtgacgagacggaacaggctctggcggataacgaggaaaaaatgaaagtgcttgccgagagagaaatcccttcgttgcgtgcagccttgaaagaggtgaacaccgacatggaattctccaaagtaatgctgaatacggaagctacggcaggagagaagctgatgctgctgcaaggctgggcgccggcatccagagtcggagaaatctccgaatggctcgatgcgcagcacgtgtactacgaggtaacctctcccgtaccgggcgacaacgtgcctatacagttgaacaacaaaggtttctttgcctggttcgagcctatatgcaagctctatatgctgcccaagtataacgagctggacctgacgccgttctttgcacctttctttatggtgttcttcggcttgtgtctgggagactccggttacggactgttcctgtttctcggagcaaccctgtaccgtctgtttgccaagaacatcagcgctgcgatgagacctgtcctctcattggtgcaggtattggcggcatccactttcttctgcggattgctgaccggcacgttcttcggagcgaacatttacgatatcgacctgcctttcttccaaaaaatgaaagcggccttgttcatggacaataacgatatgttccagttgtcgttgatactcggtgtggtgcagatattgttcggtatggtgctgaaagcggtgaaccagggtattcagttcgggttcaagtatgccgtggctacgattggctggattatattgctggtttcctgcggagtaggagccttgctgccggaagtcatgccattgggcggtacggtgcatctgtgcatcctcggtgtggcggcagccatgatattcctctacaacagtccgggaaagaacatattcctcaatatcgggcttgggctttgggattcctacaatatggctaccggattgctgggcgatgtgttgtcgtatgtacgtctgtttgccctcggactgtcgggtggtatccttgcaggggtgttcaacagcttggcggtgggcatgagtcctgacaatgtcattgcaggtcccatcgtaatggtactgatattcgttatcggccatgccatcaatatctttatgaacgtgctcggtgcaatggttcaccccatgcgtctgacctttgtggaattcttcaagaactccggatacgaaggcggaggcaaggaatacaagccgtttaagaattgagagttgagaatttaaattgagaaatagagaataaaggattgataaaagaggaagataggagctgcgcggagatagtgtgatcttttctccgagagtcttcaggagaattcttcaaaagaaatctttaagagaaacaaataaaatataaacaataaaaaacgaataagattatggaaatgaatttattgattgcctatattggcattgcagtgatgattggtttgtcgggtatcggtagtgcctacggtgtgacaattgccggtaatgcggctatcggtgcgctgaagaagaacgacggtgctttcggtaacttccttgtgctgaccgctcttcccggtactcagggcttgtacggttttgcaggctactttatgttccagactattttcggcatccttactccgggcatgactgccattcaggctgctgccattctgggtgcaggtattgctttgggattggttgccttgttctccgctatccgtcagggacaggtttgcgccaacggtatcgccgctatcggtcagggacacgacgtattcagcaacacgctgattcttgccgtattccccgaactttatgcgattgtagctttggctgccactttcttgattggcagtgcgctgaccgcataaacagcaattaccgactgcacaaatagcagttgaaataaaagaagagggtgtcaaaatatacttgctgatttcttttagtcacggaattatacggaaaaagaacaaagaaaatctgtgttttccgtgtaatccgtgcctaaaaagaaacagacagcaagcgagtttaagttttgatataccctctttttcatatcttcttctctgtcttttccttctattccgtacaaacttctgttttttctcttttcatcggtaatcttcgctcttctctgtattggtgggcttttagcgtttgccggtagtatttatgcaaacgattgtttatgcacatttaatcagttttttcgattaaaaggctatttttcaaagaataatgcgtacttttgcagccacaattacgataaagagattataacatatatggttaaagaactacttacccccgattacatcttcgaagcgagctgggaagtatgtaataaagtaggcggtatctatacagttttgtctaccagagcaaacactttgcagacaaaattccgcgataaagtattttttgtaggcccggacttctggcaaggtaaagagaaccctttatttatcgagtccgataacctttgtgccgcatggaagaaatatgctattgaaaaagacaacctctctgtccgcgtaggccgctggaacattccgggcgaacctattgtcatattggttgacttccaacctttctttgcacaaaagaatgaaatttatgcggagatgtgggaacactatcaggtggattcactgcacgcatacggtgactacgatgaagcctcgatgtttgcatacgccaccggaaaggtggtggagagtttctaccggtataacctgacggaaacggacaaggttgtatttcaggcacatgagtggatgaccggtatggctgcgctttacttgcagactgccgttcctgaaatcgctacgatattcaccacccatgccacttcgataggccgttctattgcgggcaacaacaaaccgctatacgattatctttttgcctacaacggcgaccaaatggcgcaggagctgaatatggagtccaaacattccatcgaaaagcagaccgcccattacgtagactgtttcactaccgtaagcgaaatcaccaacaacgagtgcaaggaactgctcgacaagcctgccgatgtagtcctgatgaacggctttgaagacgatttcgttccgaaaggctccacatttaccggtaagcgcaagcgggcgcgttccactatgttgcgtgtggcaaacagcctgttgggacaggaatttgataatgatacgcttatcatcggaaccagcggccgttacgagttcaagaacaagggcatcgatgtgttcctggaatcattgaaccgtttgaaccgtgataagaatctgaataagaaagtgctggctttcgtcaacgtacccggttgggtgggtgacccccgcgaagacctgcagcagcgtctgaaaaagaaagacgagcattataccactcctttggaagtacctttcatcacgcactggctgcacaacatgacgcacgaccaggtgctggacatgctgaagtacctcggtatgggcaaccgtcccgaagacaaggtgaaggtaatcttcgttccctgctatctggacggtaaggatggcattctcaacaagcattattacgacctgatactgggagaggacctcagcgtttatccctcttactatgagccgtggggatataccccgttggagagcgtggctttccgcgtgcccaccattacgaccgaccttgccggcttcggactttgggtgaacagcctgaagaatcagcacggtatcaacgatggagtagaggtgctgcaccgttcggactataactattccgaagtggcggacggtatcaaggacaccataactttgttctctacaaagacagatgcggaaatcaaagaaatccgtaagcgtgccgcccaagtggcagagcaggccttatggaagcatttcatacaatattattatgaagcctacgaccttgcgttgcgcaatgcgatgaagcgtcagttgggctgataaaaagaattatatttatcaatcaagtaatcatacaatgaagattaaagttagtaatgtaaacactccgaactggaaagatgtgaacgttaaatctcacatccccgctgaattggagaagttatccgaacttgcacgtaacatttggtggtcatggaactttgaagccaccgaactgtttagagaccttgaccctgctctttggaaagaagtaggacagaaccctgttctgctgttggaacgtatgagctatgccaagcttgaggcgcttgctgaagataaggttattttgcgcagaatggaagatgtatattccaagttccgcaattacatggatgtaaaacccgacagcaatcgtccttccgttgcatatttcagtatggaatacggtttgaatcatgtacttaagatatattccggtggtctgggcgtacttgccggcgactatttgaaagaggcttccgacagcaacgtagacttgtgtgccgtaggtttcctgtaccgttacggttatttcacccaaaccttgtctatggacggacagcagattgccaactacgaagcccagaacttcggccagttgcctctcgaccgcgtattggacgaaaacggaaagcaggttgtagtcgatgttccttacctggattactacgtacatgcttatctttggagagtgaacgtaggccgtatttccctttatctgctcgatacggacaacgagatgaatagcgagttcgaccgttccatcactcaccagctttacggcggcgattgggagaaccgtttgaagcaggaaatcctgctcggtatcggcggtatccttaccctgaagaagctgggtatcaagaaagacgtatatcactgcaacgaaggccacgcagcgttgattaacgtacagcgcatctgcgactacgtagccgaaggtctgacctacgaccaggccatcgagctggtacgcgcctcttctctgtacaccgtacacactccggttcctgccggccacgactacttcgacgaaggtctcttcggcaagtacatgggcggttatcctgcccgtatgggtatcactttggacgacctcatggacctcggccgcaacaaccccggcgacaagggcgaacgcttctgcatgtccgtattcgcctgcaacacttctcaggaagtgaacggtgtaagctggttgcacggaaaggtttcccaggagatgtttgctcccatctggaaaggttacttcccggaagaaatgcacgtgggctacgtcaccaatggtgtgcacttccccacatggagtgcaacggagtggaagcagctctatgccaagcacttcgatgaaaacttctggtacgaccagtccaatcctaagatttgggaagctatctacagtgtacccgacgaagagatctggaagacgcgcatggctatgaagaacaaactgattgactacgttcgtaaggaataccgcaagacatggctgaacaaccagggagacccctcacgtgttgtgtctctgctggacaagattaacccgaatgcactgctgataggtttcggacgccgtttcgccacttacaagcgtgcacacctgctgttcaccgacctggaccgtctgtccaagattgtgaacaaccccgactatccggtacagttcctctttacgggtaaggcccacccgcacgacggtgcaggtcagggattgattaagagaatcatcgaaatctcccgccgtcccgaattcctgggtaagattatcttcctcgagaactacgacatgcagttggcacgccgtcttgtatcgggtgtggatatctggctgaacactccgacacgtccgctcgaagcatccggtacttccggtgagaaagcgttgatgaacggtgtggtaaacttctccgtgctcgacggatggtggctggaaggctatcgtgaaggtgcaggctgggcgttgaccgaaaaacgtacttaccagaatcaggaataccaagaccagttggatgccgctaccatttacagcatcctcgaacaggaaatcctgccgttgtactatgcacgcaacaagaagggatattccgaaggctggatcagaaccatcaagaactccatcgcacagattgcgcctcattacacaatgaagcgtcagttggacgattactatagcaagttctacaccaaggaagcaaaacgcttcaaggcattggctgccaacaactatgccaaagccaaggaactcgcagcatggaaggaagaagttgtggccaagtgggacagcatcgaagtcgtatcctgcgaaaagaccgaagaactggtgaaaggctctctcgaaagcggtaaggagtacaccattacctacgttatcgacgagaaggggctggacgatgctatcggtctggaactggttactacttatacagctcaggacggcaagcagcacgtttactccgtagcaccgtttgaagtagtgaagaaagagggtgacctctatacgttccgggcaacacataagctggagaacgcaggcagcttcaaggtagcttaccgtatgttcccgaagaacgcagaactgcctcaccgtcaggacttctgctatgttcgctggttcatctaagataagataacaaaacagatggtgcgttggtatgaaacgcatcatccgtttgatacagacagaccatccgtttacccgaaacggatggtctgtttttttatagggtattattatatgggcaaacggtgatgaatacgtgtgtcggtccgtttattttcctacctcttgaaagagcgtgatgctcaggaataccccgataacgatgcacatcagaatcaggaaccagttcatgagacgtgcgctcagtttcgtttccttgtgcaggttttgggctatgtaattcttgaagaacaggtagatggcaggtacggtggcgcttgccagcagcaggtcttcgggaatcttgtacacatacactttggagaaagcgatgagcgcccagtggcagaggaagaggataacgagcagattgactttgcgcgagaacgccaacagcagtccgatggtaaatgcggctaccgagcagggcattactgtggtcgtcatcatcgggaactccatgccgcgcgcccacgaaaggagcgggtataggaagggcatcgcgtagagcactcctgccagcatagggtacttggggttacgctcgaacggagtgtaaccggtaaataaatcccacagccaaatcaatgcgacggttccccagaatgcggagagaacgtagtgatagttgcgcgtgtcgcagtacattgcgtagtacaccagcgctatccagccgttgaggaataccatatatattttcatggagcgttttgtccagacggtgggacggcggtatagcaatgcagtcagcaggatgcccgctgcggtaatgagaatctgcgcccaccaggtgctttcattatactgtgcgatggtgttccaaaatgtttccatataagtcagcttttgtttccgggagatatgataaacattcgctctgcccgttttcttttgtccgaaaatgtgtacaaaggtatcggtttccgatgagatatgaaattcttttccctattttgcctttctttcttctaaagaaaaaatgatttctttgttatgccggtgtaggaaactcatgctttttatgtacttttgtactcctttttgaaaataggtaaaaatcagatattagttagtggaaagtttgatggacaaaacaatggtcgagcaagagattatcttgcgcaggaagcttgatttattgcttcgtacagggaaaatattagtggagagtgctgccgataccaatcgcattgtacgcaatatgaatcgtgtggcggcttatttgggattacctgaggagaatcttcacatcgacgtgacttatacaatgctggtggtaaacctgagtgacgaatcgcactcttattccaaatttcagaagtgcgagaaacatggtatcaacatgacggccatatccgaaatcagcaagctgtcctggcgtgccattgaggaagactattcgctcgaccgctacgaggaagagctggagaagataaaaagcaagaagcggaactatactccctatctcgttgccatcggtgcgggttttgcctgcggcggtttctgcaagctgttcggtagcgactgggttgcatttctgtttgcctccatcgccgcttttgcaggtttccgtgtccgtgcgcgctgcatagagttcggtatcaatctgtatatgagcatcaccattgcggcgctggtgtccacatgtctggcttatatcaccacctttacagggctttcgggcacgccttaccatccgctgctggcgtgcgcgctgttcattgtgccgggagttcccattataaactttgtggacgacatgattgacaactacatacaggtgggcatcgtgcgtgccgtcaatacggtgctcatggtgtgtgccatggcgttcggcattgtgatggccatgcgcctgctggctatggaagatgtggtgattgacaagaagttcagcgagctgagcatggttccgcacgatccttattatatatacgccattgcggcagccatatccgcgatgggcttctccatgatattcaatatccagcgccgtctgctgtgggtggttgcggtagggggaatccttgccgtgtgtacgcgtaattttgtcaacttcgagctggggctcggtccggtcatcggttctttcatgggagccatggtggtgagtctggtggcggtgaaggcagtccactggtttcatgtgcctaatcacgtgcttaccattccttccgtcattccgatgattccgggagtgttgatgtaccgtgcgctggtggccctcattaatatgcacggagtggtgggcgaggtcacggtggctgtgtccaatggtatcaacgcttcgttgattatcctttgcattgcgctgggggtagccgttcccaacatctttgcccgccgttatatagccaaagaccgtcagcgcttcctgaaagaggagttgcagaagcgcagggagaggggaaagttccttgagtggtaagagtggtatgtttgatataaaaggggctgtctcaatcgctgaggcagcccttttccgtttgtgtcttttcccttatgcggcagaaacaggatgctgcgaaagaacgggtgcgtttaccgcaaccattcgtttagcagcttcatcacttcttctttctccttttcgggcagtgtggagatgcgtgccagatggctgccgcccggctgaatgaatacgtgaatattctttttctctttgagccaggtaactccggcagccgtccagggatcgttttcaccgtagatgaatatcattttcgggtcgttcttttgcaagaatcccttaatcttcctactgagtgtcttgtcaaaaggcatatctttcagttcctcgggaagcatcaggcgatgcaggtagcctttgccggacttgatggagagatactttttgaaaggacgggtgtcgtagccgtaatagcccaattcgcgtgcggcctgtacgaagaaagaggcgttggtactgtcggttgtgaaataggacgggtcgctgatggccagcaggtgggctatgagttctgcgtcggtggctgtgggtagcggaatgctgccgacgggagtaccccattgccagagcgcgaatgaatattccagtaccgaatagtcgtatatctcttcgataggagcacggaacttatactcttgttcggtgcagtatttctcgaaaagggggagtaaggccgctttgcgtttcaggatttccagctggaagtcggtaattcttttacggtcttcatccgtagacacttttttgaggaacggttcgtgacggccgtcctctgttccgtagcagaggggagccacgtaaggaacggatacatccacatcgtccggatagaatgtgcggtagagcagggcggtctgtccgcctttgctgataccggtagcaatccattttccgggatatatgtttttgaatgcggttgttaccgcgtgcaaatcatcggcggaactttcggctgtaaggtatcgccagtctttgggttcgggagtggattccaggaaatagcggtattccacaaataccatattggcattgaggagcctggaaagttcctcgcgatattggggcttgagcgcgtaggcggctccatatccttcggttataatgaccgtgggacgatcgaagcccgcatgcgccacgataacccgctggcggaaacttcctttcttgggatgccggtggtcgagcggctgggtgaaataggttacatacttctccgaaaactcggtagattccaacggttgggtttccgttatggcggaaatctcacttagtttctgctgtaagccggtctgtgcggataaggataccgatgccagcaagaatgtaaacagcagcaatgctgtatggcgtgtacgcaggtctttcataatgtgtttatttgtaattggggacaaagataatctgttttcctcttcaggctgctgtctgccggataaaaaaggggaaagaactaccatcacggcacttctttcccctgcaaacttaaaacaaccaacaaaagaaatagataatttccggtttcagagtttgtatgtctgaaatagctctttatcttataaacaacagttccctgtatttcggtaatgtccacatctggttgtcaacgatgagttccaacttgtcgatgtgatagcggatttcttccatcatcggtacgatgttgtcgtgataagcgatggctttgtcgcgttcacattcaatcttgttggcaaccttgcgggcttctatcatggtatctacatgttccttgatgaaggtggtacggtcggcaatctcttcgatgagttccaaattcttggcagacagttttgcagctttctctaccgggaagaggtctttcattttgtagacattgtctatcaaatccgtctgatattgagtggctacgggaatgatgtgattcatcgccaagtcaccgagcacgcgggcttcaatctgaattttcttggtataggtctcccacttcacttcgttgcgggcttccagttccttttgcgtcattacgcctacagactcgaacatacggatgctttcgggcttcagatagttgtcgaagatgaggggtacactggtttcgcagtccagaccgcgttttttggcctcggctttccattcgtcgctgtagccgttaccgtcgaagtgaatgggcttgcatatcctgatgtatttgcggataacgtcgaggatagccgaaatcttcggttcacccttcccgataagtttgtctacatccttcttgaattctaccagttgctcggcaagagcggagttcagggcaatcatggcgctggcacagttggcttccgaacctacggcacgaaactcgaagcggttgcccgtaaaggcaaacgggctggtacggttacggtcggtgttgtctatcattagctcgggtatctgcggaatgtccagcttcatgccctgtttgccgctgaggctgatgaggttatccttagtgctttcctcaatatgttctagaacctgactcaactgcttgccgaggaagctggatatgattgcaggaggcgcttcattcgctcccagtcggtgggcgtttgtggcgctggagatgctggctttcagtaatccgttatgtttgtagactgccattaaggtatttactacgaaggtgatgaagcgtaggttgtcttcgggcagtttgccgggggcatggagcaggatgcccgtgtccgtacccaacgaccagttgttgtgcttgccgctgccgttgacacccttgaatggcttttcgtgcaacagtactcggaagccgtgattacgtgccaccttgcgcatcagagccatgatgagcatattgtggtctactgcaaggttgcattcctcgaagataggagccaactcgaattggttgggagctacctcgttgtggcgggtcttgacagggattccgagtttcaacgcttcgatttccaactccttcataaaggctgccacacgcggagggatggcgccgaagtagtggtcttcgagttgttggttcttggcactatcgtgtccggtcagtgtgcggccggtcatcaacaggtcggggcgggcggcgtaaaggccttcgtcaatcaggaagtattcctgttcccagcccaagtacgccactactttctttacgtccgggttgaagtagcggcatacgtctaccgctgccttgtccactgcacgcagtgctttgagtaacggcgctttgtagtcaagagattcacccgtgtaggcaatgaagatggtaggaatgcagagcgtatcatctactatgaacgcgggagaagaggggtcccatgctgaatatccgcgtgcctcgaacgtgttgcggataccgccgttggggaagctggatgcgtccggttcctgctgcacaagcaacttgcctgtgaattcttccatcatgccgcccttgccgtcgtgttccacaaaagcgtcgtgtttttcggcagtgccttcggtgagcggatgaaaccagtgcgtgtagtgggtggctcccatctcaagcgcccatttcttcattcccgccgccacttcatcagcaatactgcggtccagcggcgcaccgttgtcaattacatcaatcagtttggcatataccttgctcggcagatacctgaacatcttttccttgttgaatacatacttggcgaagtattccgacggacgttccgccgggactgccactgcaacgggtttcttcttgaacgccgtctctactactctgaatctcaattttgacataataccttagaattgtaattgttggtttataaatatatgatagaataaaaaaacttgttttagttgtaagcggactctccgtgctcgtagatgtcaagtccttcttcctccacgcgagccggaacacgcaagccgtgtatcttgtcgagtactttgaagatgatgaagcccatacctgccgcccaaagtccgacaattaccgcaccgaatatctgtgctccgaggaagcccgcacccgcaccgtagaacagaccttcactggtagagaacagtccggtaagtaccgttcccgtgaaaccacatacgccgtgtacggaagatgcgcctatggggtcgtcaattttcagtactttgtcaatgaattctacggcatatatcatcagtacgccacagatggcgccgatgatgaccgcacccagcggagcaacggcgtcgcatcctgccgtaatgcctaccaatcccgccaaaataccgttcagcgtgagtgacagggacggtttgccgtatttcagccaactgacggccagggcaaagaaaccaccagcgcaagctgccaagttagtgttgaggaatacgagcgagacagttacctgatcctcggtagtggctgccgccaactgagagccggggttgaaaccgaaccatccgaaccataggatgaacacgcccagtgccgcaatggtgaggttgtgtccggggatggcttttgaccggtcgtctttgccgtacttgccgatgcgcggaccgaggatagctgcacctaccaatgcaatccaaccgcctacggagtgtacaatggtagaacctgcgaaatcgtggaaggtagttccgaatgtttccgtcatgaaggaacctgcttcaccgttcatcagccatccaccaccccaagtccagtgcccggaaacgggataaatcagtacgctgatgaagattgtgtaaaccagatacatggaaaactttgtacgctccgccatagctcccgaaacaattgtggcggaagtggcgcagaatacggtttggaatacgaggaaaccttcggtaggcaatgaagcggggtcgggcaggccattgctatcgaacaacaggctcatgaggtgaggagttccgaagaagtcgcctaaaccgaacatgatgccgaaacctaccagccagtaaagaagtgagccgaacatgaagtccacaaagtttttcatcagtatgttggcggtgttcttggtgcgggtgaaaccggcttccaccaatgcgaagcccggttgcataaagaataccaacatggccgcaagtaacatccagacggtgttgacaccggaaaccaactgggcgacggtatcggttgccacactatccgtagctacggcggtttgtgcatacatatctgttgtgaggcagcaagctatgagtatagcaagggccgtacgcagttttgtgaaactgcgtttcatatatttgtccataatcttttgggtttttagttgtacttgtattttgtttttcactgagcacgccgctcaatgaaaatcctgtgggttgagtgctgccggttatctttcctgttcggcattatagagggcaatgtcaccccgttctccggtgcggatgcggatagcgtcttcaatggggatgacgaagatacggccgtcgccgatttcgccggtttgtgcggctttgatgatagcttgtactgtcttttctgcgtttttatcgcgtacaacgatagagatgaggatacgttcgatggaactggtgtcgtacagtacaccacggtaaatacgggcttgtctggattttccgatacctcttacatcgtaataagagaaccattcgatatctgcttcgaggagtgagtctttcacttcctcgaatttggttttgcggatgatagcttcaatctttttcataccttaagctgttttattgttcttaaaaacttaatcctactacgaagtatgctctttccgaacagggattccaagtagctttggcaaagagtggcagggagaatgaattggttatcctgatatcctttgtagctccgaggctgacgtcgcatacggcaaatccgcttgctccgtagaagtccgtttcccatggagtggcgcctacttcggctgtccagtcaagtccgcccaatttgaacggagcggctatggaaatataggatgaataggctctgtcaccattctccttgacaccgtcgtctccggcaaagttggtgtaccagtttactgctaccggtccgaagtcgtagcccacttgggcttcgtacaggtgggttgtattgtgggcaccgtagtggaagtaacctgctccggtattataccaataatcagtgattgatacgctaaagccaccggtggagtagcccagtgtgaggtcgaactctttagcatcgtaaccgtcggcatctgttttttcaatacctaccgatccccatgcttccaaagacaaacctttataggcgatggatgcgttgggttgaaggcttacaccgcccaagtcttgtccgcgccagatgtagccgcttacgatgtctgcgcctacggatgcttttactttgtcctgtgcctttgccgtgaaaggcattgcagctgatagtaacgttattgctattactcctaattttgtgtttcttgttttcataccttcttacctttttagttagaaaaattgcggatgatcagtccggttctgttagtatagtattgcgcttgaactattaaatagtaggatgtttatattcttcacttttatttcagccagttgcggatgcgtttcatggcttccacacagtcttcgtgtttgccgaaagcggtcaggcggatatatccctcaccgcttggcccgaagcctacacccggagtacccactacattggcttcgtacaacatttgttcgaagaaccgccaagagcttatgctgttcggggttttcagccagatgtatggggcgttcacaccgccgtacacttccagcccggatgtttccagtccttctttcatggtgcgggcgttgttcatatagtagtcaatcgtttcttttacctgccgtctgccttctgcggtgtagatggcttcggcggcacgctgggtaatgtagcttgtaccattaaacttggtgcattggcggcggttccacagtttgttgagggagatacgttcaccttccagcgtagcggcggtcagttctttcggtactacggtgtagccgcagcgtacgcctgtaaatccggctgtctttgagaaactgcggaactcgatggcgcattttttcgccccttttatttcgtatatggagtggggcacatcgtcctcttggatgaaagcctcgtaggcggcatcaaataggataagcgtgtcgttgtcaagggcatagtccacccactttttcagttcgggtttggtaagggtagtacccgtaggattattggggtaacagaggtagacgatgtcgatgcgtttgtccggtatttcggggataaagttgttttcggccgtacagggcatataggttacattgctccatttgccgtctttttccaatatgccggcgcgtccgcacattacgttgctgtcaatgtagacggggtagatagggtcggttactcccacactgttgtcatggcggagtatgtcgcctatgtttcccgtatcgctcttggctccgtcgttgatgaagatttcctgtgggctgaaatgaacgccgcgtgtcgcgtaatcgtgtttgataacggcatcaatcagaaagtcataaccctgttcaggaccatatccgcggaatgtcttggcatcagccatctcatccactgccttgtgcatcgcttcgatgcaaacttgcggcagcggacgggtaacgtctccgatacccagacggatgacttcttttttagggtgcgttatcctgaaagtattaatcttcttagctatgtccgaaaataagtaacttccgggcagtttcaaaaaatgttcattaactaatgccatatctctgttggtttaattatttgataatgatgaattgataatgaagaattgccatgtggcacaaaagcgtatactcattcataattcttcatccgtctccatctctccctcgaacaccttggttgcctctcccgtcataaagacgtgcttggtggctatatcccattcaatggtgagtgttcctccatccatgacgatgattgattttcttccggcacgtcctgtgaggaaagcggctacggctgtggcacaggctcctgttccacaggctcgggtgacgcccgaaccccgttcccatacgcgcatccttatctttccctcttccaatacttgggcaaactccacattggtgcggtcggggaagagagggtgattctccagtttggggccgatagaggagaggtctaccttcgtaatgtcgttcacgaagattaccagatgcgggtttcccatggatacggtagtacccgtatagcgtatgccgtctatttcgatgggatgttctgtcatcggcttgctccccttgccgtcatagttcacgggttcgtcagacggaatacccatgtcaacggttacagtgtctactttatcgcctgtcgcgtgtagttttagaatcttgatgccggacagggtatcgagtgtgatttctgttttggaagtcagcttgtagtcataaaggtatttgccgatgcatcggctggcattgccgcacatcttggcttccgaaccgtccgcattgaaaatgcgcatgctgaaatcggctttgtcggagcgccctataagtaccagaccgtcactgccgattcccgtatgcggtgcgctccatttcttcgagagtttctccgggttctcgataggatagcgggtagtgtctacatatatgtagtcgtttcctgcgccatgcatcttgataaactttatgcttcttgtcattttgtacttacttggttagttgattgtatccttttgtcttatttcactgcaaatatacgacgttttggattatttttatctatattgatatctgttttctatttatttctattcctgctttcattcagtgcaaatatatatgatttccctttcaatttaaaagtatatgatgctatattcgtaaagattgtaatataatgctctcgcactcttgcggggaaataataaaaatgattgttttattcgcttattactacctttttgaaatataaaagctgcttcattgttttcataatgaagcagcttgtctgtaataactttctaaatgtattgtaagctgatgcttttactgtaatatttcttgcagttctacggggacgttggtagtgatgaaatccacaccgtggtcaatcaaccacttcatgtctttggcatcgtttacggtccaagcatttactttcatgcccaagtcgtgggactctttaatccattcgggatgtcttttgaatacgctgaagtgatagtcgggtccggcgcatccccattctttcagttctttgggagagaggtcgccttccagataatataccggagttcctttgggggtaagacggataaattctttggtggcgtgtcgcgagaaagcgatgtattccatgcggttctccaatcccatgtctttcaccatcttcacgatactttctacggcacgtgtttcccgttcgggtgtcttgtgggatttcagttccagaataaggcgcgttttcagttgtccggccttttccaagtattgccgcagggtggggagttgctctccgttgtccagtatgacggcggtacactgttgtgcggtggatttctgcatattcactcccttgaaagtgctatcgtggtttactacaagttggttgtcggcggtgagccatacatcgaactcggaaccgtaacaatttatggagtcggctttcaccagtgcggcaatggaattctgtgccgaaccgtctgttttccagaagccgcggtgagcaatgacttgggtggactgtgcctgtgtatagccacaagcggcaagtagcagggcggaagtgataataaggcttttcagtttcatgggctttagaattaattattttcatcgttctttcgcaaaggtagcataagcttacgaatatgaaacagaaagtatattaaaaatccgttgcatttgccgtgtggttactttttttaaggttcagtccttgtaggcttcttcgtgcacaccggcaacggcgcgtccgctagggtcgtttttcccttggaatgagacgtcccatgccaatgcttcggcggtggaacaggctacactcggtacgctgggtacactgcgggcggcactctcgctagggaagtgctcctcgaaaatagtgcggtagtagtattcctctttgttcatcggtgtgtttacggggaagcgttcggaggctttccgcatctgttcatcactgacggcagcggcagtgacagctttcagcgtatcaatccagctgtaacccacaccatcagaaaattgttctttctgacgccatgcgacgctttcgggcagcatatccgcaaaggcttcgcgaaccactttcttttcaatttcttttccgggacacatcttcgtggcaggattcagtcgcatggctacatccagaaattctttgtcgagaaacgggacacgtccttccacgccccaagcggcaagactcttgttggcgcgcaggcaatcgtaaaggtacagtttggagagcttacgtactgtttcttcatggaaggcttgtggtgtgggcgctttgtggaagtagaggtagccgccgaatacttcgtccgcaccttcaccactaagtaccatcttgatgcccatgctcttgatgacacgcgccagcaagtacatgggcgtggatgcgcggacagtggttacgtcgtaggtttcgatgaagtagatgacatcgcgaatggcgtccagcccttcttgaatggtgtagtttatttcatggtggatagtgccgatgtattgcgccacttcacgtgctttgatgaggtcgggagcacctttcaagcctactgcaaaagagtggagttgaggccaccacgcatctgccttgttgtccgtctcaatacgttttccggcgtatttcttggcgatggccgagattacggaagagtccagcccgccggacaacaacacgccgtaaggtacgtccgacataagttggcgctgtacggcggcttcgagggcatcatgtacggcagaaacctgagtttggtaggttgtggcattgacgtcagggtaaccagtatgatagttgtcttttacggcaaggtattgcatccagtcgcgagtgtaccagcggtgcattttaccctcacgtccccggtaatagtgtccgggcaggaaaggctcgtactcgtcgcagaagccttcgagagctttcagttcgctgccgaagtagatgcggccttccttgtcgcggcctatatataaaggtatcactccgatggggtcgcgggctatgaggtaatcgtccgtctcttcatcgtagagggcaaaggcgaagataccgttcagttcttcgaggaaattgatgcccttgtctttgtagagggcgaggatgacttcgcagtccgaacccgtctgaaaggtgtactttccggcgtaatgtgcacggatatcgcggtggttgtatatctcaccgttgacggcaaggatttgcttgcggtcgggcgagtacagaggttgcccacccgattgagggtcgacgatagaaagccgctcgtgtgcaaggattgcggagccgcctacataaataccgctccagtccggtccgcgatggcggattttctgtgccatttttaaagctttactcctgagttccggagtctgggattttatgttgaaaatacctgctattccacacatggttgtagttgttttagaagttgatatcgggatgatgttagttgtatcgggtgagactggcagtttcgtccgttggaacggattgtttcaagcgttgaaacgagtcgtttcacaccgggggacagaaagtttcatgcgttgaaactcttggtatccctctttgaaacttttttcgttgccgcaaaactaccggttgaagtattggtcaatccgccgggctactttgcgaccgtcagccagtgcacgtactacgagacttgcaccattggcggcatctcccgccacgaatacattctctgcaaatgtcggctgttccggtttgaggaagcccatagccaacagcaccatatcggcttcaatgacttctttcttacccgtaggtttcatggtggggcggccaccgtcttttgccggaagccattccacttcttccacttccacgccgcaaacctttccgttcttgccgatgaatctgttggatgccagtgaccagcggcgtgtgcatccttcttcgtgactggaagtggttttcaggacaacgggccattgcggccagggcgtagcgtcattgtggcctacgggtggttgtggcatgatttctatttgtgtcacgctcgtagctccttggcggatgctcgtgccgatgcagtccgagcctgtgtcgccaccgccaatgacaagcacccgtttgccacgggcattgacaagctgctctttcgggaatgtctctccgtcgaggatacggttctgttgagccagcatatcgagggcaaagtagatacctttcagttcacggccggggatggtaaggtcacgggcagtgggagtgcctgtgcagacggcgtaagcatcgaaacctgcgggcagcttctgcatatcgatgcagacacccatttcaaaccggataccttcggctttcagtacattcatgcgacggtctatcacttctttgggtagtttgaaattgggaataccgtagcgaagcagtccgcccggcatcggtttggaatcgaatatcgtgacttcgtagccacgggcattcagccgtgcggcaacgctcagcccggcaggccctgcaccgatgacagctattttccagccattgcgttcggggcggacaggcacgatatatccttcacgaaaagcggcttcggcaatggctgcctcattctcgcggatggttacgggagcatcgcaggagagtttcagcacacatgacttctcacaaagtgcggggcagatacgtcccgtaaattcggggaaatcattcgtctcgttcagtacttgataggcttcgcgccattttcctttgcagagtgcgtcttgaaactccggttgcttgttgcccaacggacatgcccaatggcaaaaaggtacaccgcattccatacagcgtgaggcttggagcttgcggtcgtgactgttcagcgtctgttccacctggctgaaatctgtgatacgttcgtgtatcggacggtagcccgcttcttggcgggggatatttaagaatgcttttgaatcgcccatgattgataaattgagaattaaaaattgaaaattaagaaataatactcagagaatcgaaaattaaaaagaacgtggaatttgtaagtacgcactattctgtattttttaattctcaattctcaatttttaatttaatagtctctttgcatatccgcaatcttctgttgcagcttcttcatctgttcttcttgcagcactttcttgtactcgatagggactacttggataaactcgtctacgtagtgcgtccagtcatcgagtaggatgcgcgccagtttggaaccggtgtagagataatgctggcggatgagttcgtgcaactccttgcggtatgaggtttcttcaatgaggcttagttccaccatttccatgttacagaagtagtcgaagtttccgtctttgttccagacgtaggccacaccaccggacatacctgcggcaaagttacgtcccgtctgtccgagcaccactacacgtccgccggtcatgtattcgcagcaatggtcacccacaccctctacaacggctattgcaccggagttgcggacggcaaagcgttcgcctacgcgaccgttgatatatacttcgccgctggttgcaccatacagaagggtgtttccggcaattgtgttcttctcggcctcgaagttgctgcgtacagggggtagtacggcgatacgtccgccactcagccctttgcccagatagtcattggcctcaccttccagcttgaagttgatacccggtacgaggaatgctccgaaactctgtccggccgagcctttgaacttgacgttcagtgtatgttcgggcaggccttttgcgccgtacttggcggcgatagcgccggagagcatcgcaccgcaggcgcggtcggtgttggcgatggtatattcgagagaaacttctttctgttcgtctacggcattggcggcggcattcagcatttccacgtcttttacgcggtcgatgccgtgttgctggtttatgatgtggcggatggcggctccgttgtccacacgcgccagtactttgtcgaagttgatgagttgatgtttcttgatgccgtcatccggtctgcggatgatgaggtcggtacgcccgatgatatcatccagtttttccactccaatctctgccagatactcgcgtacttcgcgggcaaggaaggtaaagtagttcacaaggtattcgctacggccgatgaaacgtttgcgcagttccgggttctgggtggctacacctacgggacatgtgttttggttacacttgcgcatcatcacgcatcccaatacgatgagggcagcggtggcgaaaccgtattcttccgcaccgagcatggccatgagtactacgtcgcgtccggttttcagttgtccgtccacttgcagcagcacttgtccgcgcagcccgttcagtaccagtgtctgttgcgtctcgctcagtccgagttcgggcgagatgccggcatatcggatggagcttgcgggtgatgcgcctgtaccgccttcggcgccggagatgacgatgaggtcggctttggctttcgccacacctgcggcgatagttcccacaccgctttcggctaccagcttcacgctgattttggctttcggattgacgttcttcaagtcgaagataagctgtgccaggtcttcgatggaatagatgtcgtgatggggcgggggagaaatcaatgaaatacctggaatggagtggcgcgtgcgggcaatcacttggtctactttgaatcccggcaactggccgccttcacccggcttggcgccttgtgccacttttatctgtatttcgtcggcattcaccagatattccgtagtgaccccgaaacgtccggatgctacctgtttgatggcactgcacatttcagttccgaagcgtgcggcatcttcaccgccttcacccgtattgcttcgcccgtgcagtttattcatggcaaccgccattgcctcatgcgcttcctgactgatggctccgaaagacatggcgcccgtaacgaaacgtttcagaatgctttccaccggttccaccctgtctatggaaatggggttgtgacggaagtcgagaaagtcgcgcaggaagataggcttttctttctcatcgaccaagcgggtaaactctttgaatttcttgtaactgcccagacgagtagctatttgcagggtactgatagtctctgggttccaagcgtgcttttctccgtccttacggtatgcgtacagtcctttgttcggcaataggggagcttcaccaccatcattcttcatgcgcgtttcttcctttttcatcgcttctccttcgtcgtgaaaagtgatggcgtcacgtgccacctcatccaaacggatgccgccgatagccgattttaatccgccgaagtaagcgttgctcaattcttcgctcagcccgacagcctcgaatatctttgcgccccggtaggagcggatggtgctgatacccattttgctcataatcttgaacaggcctttgcaaatggctttgatgtaattcttctctgcggtggcatagtccaactgtacctctttcttggcaacgagttcgttcagtacggcaaatgccatataggggttcagtgcgcttgcaccgaatccgaggagcagtgcggcgtgcatcacttcgcgtatctcgccgctttccacgaccaatgcggtctgtacgcgctttcctaccgaaatgaggtggtggtgcactgccgatacggcaagcaatgaggggatggcggcatggacggtatctacgttgcggtcggtcagtacaatgtagttcacgccttcggtgacggactcttcggcttccttgcacaggcggtcaagcgcttcctgcagtcctgcacgtcctttggagacttcaaacagtatcggcagctttacggtcttgaagcctttgtagcggatgttgcagagaatatccaattgcgcattcgtcaggatggggtggttcagccgtaccattttgcaatggctttcgttgggtgtcagtatgttcatgcccactgcgccgatgtactcggtgagagacattaccaactcttcgcggatagggtcgataggcggattggtgacttgcgcaaactgttggcggaagtaattgtatagtagctgcggcttgtcggaaagtacggcaagcggggtgtcgttacccattgcgctgacaggctcggcgccgttggatgccatgggtaggatgattttctcgacatcttctttggagaagccgaacgtacgtagcatactgttatagttgtccacgttgtggggcactttgcgcccgcttttcagttcgttcagttcgatgcggttgctggcgagccaagtgcggtagggcttagcttcggcaagttgctttttctgttcgccgtcgtagtaaatctcgcctttctcggtatctatcaaaagtatcttgccgggttgcagacgacctttctctttgatgtcgcccggttcgaaatccattacgccgacttcacttgccactaccatgatgtcgttgtgcgtaataaggtagcgtgcgggacgcagaccgttgcgatccaacataccacccgcatagcgtccgtcgctgaagagtagtgcggcaggtccgtcccaaggttccatgaggatagagtggtattcgtagaaggccttgaggtcttcgctgatggggttcttttcgttgaaggattccggtacgagcattgccatggcatgcggtaggctgaggccggacatgacaaggaactccagtacgttgtccagcgaggcgctgtcgctcatgttcggctggatgatgggacgcagttctttgatgtcgccaagggcgggagaggacaggacgctttcacgcgcttccatccagccgcggttaccgcgtatggtattgatttcaccgttgtgcgccaagagacggaacggctgtgccagtccccatgtagggaaggtgttggtgctgaaacgggagtgcaccagagccagtccgctggtgaagtagttgtttgtcaggtcggggaagtagttacgtaactgtagggaagagagcatacctttatagatgatgttcttcgtagacagcgacacgatatagaaatcctctcgtgcggctatatccgacctgcgtactttgttttctattcttttccttattatatagagacggcggtcggcggtttcactgtccgtaaatccggtgatgaagatttgtttgatgtcgggttcgttggcaagtgcggcctcacccagtatttcggggcaggtaggcacattgcgcaggtgcatcagcgtcaatccttctttctctatttcttcaatgatgatactcaggatggctgcccggtctttctcatctttcggaagaaaaagcagtcctgttccgtatttccctttttcgggaacggggatgccttgcagcaggatgaattcgtgcggtatttgcaacatgatgccggcgccgtctccggtcttgttgtcggcaccttccgctccgcgatgacgcatattctccaatactttcaatgcggattcaaccaattcatgtgatttgctgccgtgaatgttcactaacattcccacaccgcaagcgtcgtgttcattggtggcatcatacaggcccaactgcatgggctgtcgttgtgcgggttgttcctttgttttgttgttaaaaagctctttgtttttcatttttggtttactctaatttatgtaatacctatttgttgtatcaaaatgttttgcaaatatatatatatttagtttcaaattgataacaatattcctcgatttgtgccttgctaaatacttacaccgggggatgaagttataatctgatagaaaataccctttgttttcttctaatcttaaatcagatttcgtctgtttgctttaagattataaattagaccttttgcttttaaaatattattttccttgtctttttgataataaaataacttttttctactcttttgacaaataaatagtgaaaaggttaactttatgttctaaagaatatatatctttgcagcgcaaatcaaatactgatatattatgtgtggaatagtaggctatataggtcaaagaaaagcctaccccattcttatcaaaggtttgaagcggttggagtaccgcggatacgatagtgcaggggtagcattaatcagtgatgaccgacaactgaacgtgtacaagacgaaaggaaaggtttcggatttagaaactttcgttactcaaaaagatatttccggtagtataggtattgcacatacccgctgggctacacatggagaaccttgttccgttaacgctcatccccattattcctcttccgaaagattcgctcttattcacaacggtatcattgaaaattacgccgcccttaaagacaaactccaagccaaaggctatacttttaaaagtagtaccgacaccgaggtactgatacaactcatagaatacattcaggttataaaccgcatcgatttactgactgccgtgcaactggctttgcaggaggttatcggtgcatatgccattgccgtgctcgacagggagaatcctgatgagattattgctgcgcgcaaaagcagtccgttggtggtgggtatcgggcaggatgaattcttcttggcatccgatgccactccgattgtggaatatacggacaaggtggtctatctggaagatgaggagatagccgttattcgttgtggggagaaactgaaagtggtgaatctcaagaatgtggagtgcccgcacgaggtaaagacggtggcgctcaatctcggccagttggagaagggcggttatccgcatttcatgttgaaggagatttttgagcaacccgattgtattcatgactgtatgcgcggacgcattaatctggagggtactaacgtggtgctttccgccattatagattataaggaacgtctgcttgctgccaaacgttttgtaattgtggcttgtggcacgtcgtggcacgctgcgcttataggcaaacatctgatagagagtttctgccgcattccggtggaagtggagtatgcttcggaatttcgttaccgggacccggtgattgacagtagtgatgtggtgattgccatttcgcaaagcggggagacagccgatacgctggctgccatagaacttgccaaaagccgtggtgcatttatatatggcatctgtaatgctatcggttcgagtattccgcgcgctacgaatacggggtcttacattcatgtagggccggaaataggtgtggcgtccaccaaagcctttacaggtcaggtaactgtgctcaccatgttggcattgactcttgcacgggagaagcgtacgattgatgaaacgcaatacctcgccatagtgagggaactcggacagattcccggaaagatgaaagaggtgctgaagctgaacgaccgtatagcggagctttccaaaatcttcacttacgcacacaattttatctatctgggacgcggttacagttatcccgtagcgttggaaggcgctttgaagctgaaagaaatctcgtacatccatgcggaaggctatccggccgccgaaatgaagcatgggcctattgctttgatagatgcggaaatgccggtggtggttattgccacacagaacggattgtacgaaaaagtactgagcaatatacaggaaattaaagcgcgcaaaggcagggtgatagcgattgttaccaagggagatacggttatcggtaaaatcgctgacatttgtatcgaacttcccgaaacaatggaatgtcttggcccgttaataactacggttcccttgcaactgctcgcttatcacatagccgtatgtaaaggcatggatgtagaccgaccgcgtaatcttgccaagtcggtaacggtggaatgaccggaagcggatgatgtgtatgggtaaaacagataatgcgtttgcccttgacagatgatatgttctcagaacataaataacgcgtttttaaaagaagtaataactcattagtaaatatataaatggaacaactgaagcatgaatgtggcgtcgccatgatacgcctgctgaaaccgctggagtattacgaagaaaagtacggtacatggatgtacgggctgaacaagctctatcttctcatggagaaacagcacaaccgggggcaggaaggcgccggactggcttgtgtgaaactggaagcgaaccccggcgaggaatatatgtttcgcgaacgggcgctcggttcgggagccatcaccgagatattcggcacggtgcaaagcaactttaaagaccttacgaaagaacaactgcacgacgccggctatgccaagcgcgtgctcccctttgcgggggaggtgtatatggggcatctgcgttactccaccacggggaagtcgggcctctcgtacgtgcatccgtttctcaggcggaacaactggcgtgccaagaaccttgccctgtgcggtaacttcaacctgacgaacgtggatgaaatcttcgcacgcatcaccgccatcggccagcacccgcgcaagtatgccgatacgtatatcatgctggagcaggtgggccaccggctcgaccgcgaggtggagcgcctcttcaaccttgccgaagccgaagggctgacgggcatggacatcacgcattacatcgaagaccacatcgacctcgccaacgtcctgcgcacctcaagcaaggagtgggacgggggctatgtgatgtgcggacttaccggaagcggcgagacattcgccgtccgcgatccgtggggcatccgccctgcattctggtatcaggacgatgagatagcggtgcttgccagcgagcgtcccgtcatccagaccgcgctcaacgtctcagccgaccgtatcagggagctgcaaccgggacaggctttgctcattaacaaagccggcaagctccgcacggtgcaaatcaacaagccgcgcgaggtgaagccttgctccttcgagcgtatctatttcagtcgcggcagtgacatggacatctacaaggaacgtaaactgttgggtgagaaactggtgcccaacatcctgaaagccatagacaaggatatagaccacaccgtcttttcctttataccgaataccgcggaagtggctttctacggaatgttgcagggactggacgattatctcaacgaggagaaggtgcggcagattgccgctttgggacacaaccccagccacgatgagctggagcgtatcctgtcccgccgcatacggagcgagaaggtggccattaaggatatcaagctgcgtactttcattgccgagggcaacagccgcaacgaccttgccgcccatgtgtacgacatcacttacggcagcctcgtgcccggcacggacaatctggttatcatagacgacagcattgtgcgcggcactaccctgaagcagagcatcatcggcatcctcgaccgcctcggtccgaagaagatagtaattgtaagctcctcaccgcaggtgcgctatcccgactattacggcatcgacatggcgaagatgagcgagttcatagctttcaaggctgccatcgagttgctgaaagagcgcgagatgcgcgatgttatcgagtctgcctaccgcaagtccaaagaacaggtgagtctgcccaaagaacagatggtgaactacgtaaaggagatatacgctccctttaccgacgaggagatttccgccaaaatggtggaactgctcaccccgaaaggtacgaaagcccaagtgcagattgtatatcagcctcttgaaggcctgcatgaagcctgtccgcggcaccggggcgactggtacttcagcggtgactatcccacgccgggcggtgtgaagttgctgaacatggcatttattaattacatagaacaagtatatcaattctgaatatgagaaatgtgactcttatccttgacgacgggagccgttttcacggcaagtcgttcggttatgaaaagccggtagcgggagaggtggtgttcaacactgccatgtcgggttatcccgaaagcctgaccgacccttcgtatgccggacagttgatgacgcttacatatcccttggcgggcaattacggtgtgccgccttttaccttcgcccccgacgggctgcctgtatttatggagagcgaacgcatccacgccgaagcccttattgtaagcgattattccggtaactacagtcattggaatgctgtggaaagcctcggcaactggctgaaacgcgaacaagtgccgggcattacgggcatcgatacccgcgagttgacgaaagtgctgcgcgagcacggggtgatgatgggcaagattgtctttgacgacgatcccgataatgtgccccaagctgcttatgcgggtgtaaactatgtggataaggtgagttgcagggaagttatccgctacaacacgggcgagggcagaaagaaagtgctccttgtggactgcggcgtcaaggccaacatcatccgttgcctcttgaaacgggatgtggaagtaatccgcgttccctgggattacgacttcaacggactggagttcgacgggctgttcatctccaacggtcccggcgaccccgatacctgcgatgccgccgtccggaacatccgcaaggcgatgcagaacgagaagctgcctattttcggcatctgcatgggcaatcagctactctccaaagccggtggagccgaaatatacaaattgaaatacggacaccgcagtcacaaccagcccgtacgcatggtgggtacggagcgttgtttcatcacttcgcagaaccacggttatgcggtggacagcaacacgctgggcgcagactgggaaccgctcttcgtcaatatgaacgacggctccaacgaaggcatccgccataagcgcaatccgtggttctccgcacagtttcatcccgaagcggccagcggaccgacggatacggaatttctgttcgatgagttcgtaaaactgctataaccgttttatcggtatcgaaaaagattcggatacgtgtgaaaacaaattattggtacaatcaaatcaagacaaatgaaagagaacaatataaagaaagtcctgctgctggggtccggtgcactgaaaataggtgaggcgggagagtttgactactccggttcgcaggcgctcaaggcattgaaggaagaaggtatccacaccgtcctcatcaatccgaacattgccacggtgcagacctcggaaggcgttgccgaccggatttacttcctgcccgtaaccccttacttcgtggagaaggttatcgaaaaggaacgtcccgacggcattatgctcgcctttggcggacaaacggctttgaactgtggtgtggagctttacaaggaaggtgttttcggaaaatacggcgtcgaggtgctcggtacgcccgtacaggccattatagatacggaagaccgcgagatattcgtacagaagctgaacgaaatcaatgtaaagaccatccggagcgaggctgtggagaatgctgcggatgcccgccgcgccgctgcggaactgggctatccggttatcgtccgtgccgcctatgcgctcggcgggttagggtcgggcttctgcgacaacgaagacgagctgaacgtactggtggaaaaggctttctctttctccccgcaagtgctggtggagaaatccttgcgcggttggaaagaggtggagtacgaagtggtacgcgaccgtttcgacaactgcatcacggtgtgcaacatggagaacttcgacccgctgggcatccacaccggagagtctatcgtgattgctccgtcgcagacactgagcaatacggattatcataaactgcgcgaactggctatccgcatcatccgccacatcggcattgtgggcgagtgcaacgtgcagtatgcctacgaccccgaaagcgaggactaccgcgttatcgaggtaaacgcccgcttgagccgttcgtctgcacttgcctctaaggcaacgggttatccgctggcattcgttgccgccaaattaggattgggctacggccttttcgaattgaagaactccgtaaccaagaccaccggcgcattcttcgagccggcactggactatgtggtctgcaagattccccgttgggatttgggcaagtttcatggcgtagataaggaactgggttcgagcatgaagtccgtgggcgaggtcatggctatcggacgtacttttgaagaagccattcagaaggggttgcgcatgataggacaggggatgcacggcttcgtggagaacagggagcttgttatccccgacatagacaaggcgctgcgcgagcctaccgacaagcgtatcttcgttatctccaaggccttccgtgccggatataccgtagaccaggtgcacgcgctgacaaagatagaccgctggttccttgaaaagctgatgaatatcatggacaccagcagggcgctgcacgaatattcggaaaaggtgcaggatgaaccggaagccgcacaggttgaaggtacgtcggaagccgtgcaaggtgaaaggatgcttcactccctcctgaatgacaaagccgcgcgggaactgttgcacagggccaagatacagggtttctccgatttccagatagcccgcgctttcggcctagaacggtatatggacggtgaggacgccatccttgccatacgtgccctgcgcaagcatgcaggcattttgccggtagtgaaacaaatagacacccttgccgccgaatatcccgcccgtaccaactatctgtacctgacgtacagcggcattgcccacgacgtgcattacctgggcgaccgtaaatccatcgtcgtactcggttcgggtgcgtaccgcatcggttcctcggtggagttcgactggtgcggcgtgcaggcgttgaacaccatccgcaaggaaggctaccgcagcgtcatgatcaactacaaccccgaaaccgtatctacggactatgacatgtgcgaccgcctttatttcgatgagcttaccttcgagcgcgtcatggatatcctcgaactggagaatccgcacggcgtcatcgtatccaccggcggccagatacccaacaacctcgccttgcgtctcgatgcgcagcgcgtgcctattctcggtacgagcgccaggagcatcgacaacgccgaagaccgcgacaagttctccgccatgctggaccgcatcggcgtagaccagcccgaatggcgtgcgctgacttcgctggaagacatcaacgcctttgtcgataaggtaggcttcccggtgctggttcgtcccagctacgtgctttcgggcgcggcgatgaacgtctgctccaaccgggaagagctggaacgcttcctgcaactggcggcaaacgtctcgaagaaacatccggtggtggtgagccagttcatagagcatgccaaggaagtggaaatggatgccgtggcacagaacggggaaatcgttgcctatgccatcagcgaacacatcgagtttgcaggcgtgcactccggcgatgccactatccagttcccgccgcagaaactgtatgtggagacggtgcgccgcatcaagcgcatcagccgcgagatagcccgcgagctgaacatctccggcccgttcaatatccagtatctcgccaaggacaacgacatcaaggtaatcgaatgtaatctgcgtgcgtcgcgttcattcccctttgtaagcaaggtgctcaagataaactttatcgaactggctacgaaagtgatgctcggcatccccgtacagaagccggacaagaacctgttcgacctcgattatgtaggaatcaaggcttctcagttctccttcaaccgcctgcaaaaggcagaccccgtattgggcgtggatatggcgtctacgggcgaggtggggtgcataggcagtgatacttcctgcgctattcttaaagcgatgctttcggtgggttaccgtattccgcagaagaatatcctgctctccaccggtacgccgaagcagaaggtagacatgctttccgcagcccgcatgcttcaaaagaaagggtataaactgtttgctaccggcggttcgagcaagttccttaccgagaacggggtggagaacacccgtgtctactggccgagcgagcccgacatgcacccgcaggcgctcgaaatgctgcacagaaaagagatagatatggtggtgaacattccgaagaacctcaccgcgggcgagttggacaacggttacagaatacgtcgcgccgctatcgacctcaatattccgctgataacgaatgcacgtctggcaagtgcgtttatcaatgccttctgcaccatgacaccggacgatttggctatcagggcctgggacgaatataagtaaaagtgcttggacaaccgttccgaactccggcccggagcatccggttttccggtgtttttctacggtgtctctgcgatataaagcagagataccgtaggtaaaacccggttatagagtattgttttcttcgtcccgtagctgcgggctgtacagcccgcatatggaaaccgcagagcccgcaattgccccccgtgcggcccgcaactgcaaaacggggttttcctataagcattccgtagttttatcgatggcttttcgatattaatcaatggataaagtatgaaaaagcaggcggataaagagagcgtttccccggtttttttctttttaggcacggaattacacggatttcacggaaaaaggataaaataaatccgtatctatccgtgtaattccgtgtttaaaaggaaattatcaagtatattttgacaaaacctcttgtcataacaatggtcgtcaccgctcaatgccccataaacaaagggatagaaagcgaaagtgacgagtgatgagaaaaaacgtgtttttcctaatgttccaacgctttgttttagtcagaatgcaaagaagggataaatcagatagccggcacttttatcataccctttgatgccgattctgtcccaatcatcgagaaatccccagatgataatccaactgagttgtcggttgaattcggtgctggtctggtatatacgtcttttaccaactgacagatttcttgccgacctgcctgctttgcccaattgtgcgttcagcttgtccagcgtttcggttccgtatttgtagtactcctcgaaagcgacacttgtacggttaaatgtcatcgggtcttttccacatatatttttcagcatgtcacaccattgtccgatgcttggaatgaaccacgggctgcgtgagttgttggggatattgtccttttggcgatattttacgaggatagagaaagttgtgtaaacagttgtgaagttctctttgtcggctgtacaggtaatcaccattccgatggcttgttggtactccggaatttttccgtctgtcagcaggccgtctccgggatatggcaggtgaggataccgtttttcattccgcggatggagaatgccgtgatttgctttccggttgtgttgtcatcgctttttacgtagatggcaatccgggtcagggtatggtggaagcgtaacttcaccaggctgttgtccgaagcggaagtctggttcatcagcgggacggcgactaaaaaaatgcgctttttcatagaaaggatgtctgggggacggtataacggggcttgttagcagcaaaacagggaaaatgcttctgataaaacattttccctgtcgagtataaggagtgtcgcttggaaggcgaataaataattttacattttgttggtagggtgcaagagtatccgttattttattctttgtcggtctccttatatattttctaattgtccgtaatctgcattttagtaatatatgtacgttttcatttcagcagcgttcccgttgcctttaaataagtgatgtagttcaggtacagtcggaagcatgcgtcgactttggtttcgtacgcctgctgccacagagcttgcgcttccaggtggtcggacagggtttccagtcccacgtcgtattggctgcggctcactctcatgttctcttccgcctgttgcagggagcgttcggcaatggtgctttccagccgggcttcgtcgaggttgttgacggactgtgccagttcaagcagcatctgttcgttcatgttctcctgttcgaggcgcgcctgctccagtttggctttggctgcacgtactttattgctgtttgcaccgaaatggaagagcggtacgcttacgttcagaagcacagagaagctgccgccgtcgaacaggtcctggtcgctgatttccaagccgtggatgtagtcgtacgaacctttcacaccgattttgggcaggagttcgctgcggttcagcttcacctgctgcttggcgatggccacttgctggttcagtatggcatattcggggcgggcggagatgtcggctgtttgcagccggatgtcctgtgccacttcgggaaaagtatcggcagtgcgtatatctgccgtcagcggtttgccgatgtagtggcagaggttcatggtggccaggcgcagcgcattgtcggccttgcggatgttgagttcgctttcgttcagctttacctgcactttcagcacgtcgttctggggtttgagtccgtgtttatgggcgctttccacgtttttcatcagttccgtgagcacggcactgtatttgtcggccactttcttcatctctttggctttgatgacttgtgcgtatgcctgctctgtctttacaatgacttccgaggctgtaagcgtttcgctcaactgtgccatttccttacccagcagggacattttgtatgccgcacggattttaccgcccatgtagagcggctgttccacttgtatgccgcccatatataccatgcctatcttgtagttcaggtctattccggggaagtaggcgaaccccttgttgggaaggaattgccctgtggcatcgggctggaaagtaggcaggttgccgccggctatgccgaggctgccgtctgatgtactgtagatacccgtaccgctgaggctgaagttggggaagaagttgcccttatagctctttgcggtgtagcgtgcactttccgtttgtctggcggcagctgccatttctttattgtatttcagtgccatttccctgcattgttccagtgtcagcgtctcttgggcggagatgcaggcagcggagagcagggcggcgaggatgaatgttgtctttttcattattgttcgttttttatatgaaagaataatgcgtatagtacagggatgaacaggagtgttatcagcgttccgaatgtgaggccgcccatgatggaagctgccagcgaaccgaacatcgcgtcgggcagcagcggtatcatacccagaatggtggtcagtgcagccatggtcacaggacggagacggctttgggcgctatccaccagtgccgtaataggttctaccccttggttgagctgaagggtgatttcatccatcagtacgatgccgttcttgataagcatgcctatcagtcccagcgtacccacaattgccacgaagttgaacgtcttgtctgtaagcagcatcacagccaccactcccacaagcagcatgggcagactgcagaagatgataatcggcttgcggtagtccttgaacagcatgataagaatggcaatcatcaggatgatggcaagcgggaagttcttgaacagatactccatggactcgtcgctggcgctcttctcgccctgccaatgcagggtatagccttgcggaagctctatctgttctatccgacgggcgataatctgccttgccttttcggtctctatgccgggagcgggagagcattgcacgcgctggctgcgctgtccgttatagcgcggaacaacggggtcttcccagcggatgtcgatgcgcttgctgatttgtttcagcggggtgcttcccatgaggctttccaccagttcttccttgctcagtgtacctgccttcagtttcaccatggtttcctcgttcagcagtccgttcagcgagggcagggcggagaatacctgcgtattgccgaggtcttctatcggctttccttcctcgtccagacatttcaggtagatgttgtcgcggtggatgccttcgtagaagaacccgatgggtatgccgccgttggcggaaagcagggacatgcttacgtcgttgcggctgagatccagcgcgcgggcggctgcctggtcgtactcgatggagagtacgggtatctgcggttcccagtcggtggtgatgaggcggacctccggcgtgtgttccataatgtaccgcgcactgtcggccaagcggtgcagtacggcagggtcgggccccatgaactgcgcttcgatagggtacttcttgaacatcaggttgtagcgtttcaggttgatgtaagcatccggataacgccgtgtcaggtattcctgtatctcatccatattctctaccaggtcgtcaggagaggtgaagtctataatcagttcgccgtacgacaaggacggattggcgatgctgcgcaccaggttgtagcgtcccggcgtgccgccgacagaggcggtgacatgggtaatctccttgcgtgttttcaggtaggattctatctcccttaaatcgcgtgccacgcgggtggagttattgccttcgggcagcttgtactccatgtagagctggtcgtacaccatatcggggaagaaaccctgccgcatgtagccgtagccgaaaatggaaagtcccagcagggcgagcatcgccagtacgacgctccagcgatgtgccagtccgaagtagagggcggtgcgcagcagggcataggtacgtcccttgtattcgcgctttccggtggcgctgacttcaacggcagggtgcagcttgcggtttgccatcagcggcacgtgcaccagcgccagcacccaactcagcagtaaggacaccgccagtacgatgaacaggtcgcgggtgtataccccggcagtgtccggcgacaggaagatgggaaggaaagcgatgatggctatcagtgtggcgcccagcaggggcattgccgtctggcggccgatggctgtcattgcctccatgcggtttttgccggctttcaggtctaccagtatgccgtctacgatgacaatggcattatctaccagcatacccattgccagcacgaaagcggcaagcgatacacgctgcatggttccgtccgccgtgtacaggaacaggaacgaaccgaatacggtgacaatgaggctgatgccgatgatgattccgctcttgaaacccatggccagcatcaggattaccacaacgatgatgacggactctatcaggttgatgacgaaagtacccaaagaggctcccacacgttcgggctgatagaataccttgtggcactccacgcctgcgggcaggcggctttctttcagttgcgccagttttttctctacggcagcgcccactttcacgatgtccgaaccgctggaagctgcgatgaggattccctgcgcccgttcgctgtcgaagaacagttcgttgcgggtaggctcttcgtatcctttctcaatgcgggcaatgtcgcgcatgcggagctggtcgtcgtcatgcccttgtatcagcatgctgcctatatcttccactgtcttgaacttgtcactgacggtgacgcggatgcggttgtcgccgttgtcgtagtcgccgctgtaggtggtcttgttctgtccgttcaaggtggcgaggacttcggcgggctttacgccgaggtttgccatgcggtcttgcagcagggagatgttgatgcattcgggacgtttgccgtacagttccacccgttccacgcccgtcatgtcgcttatttcgcgcttgataagctctgcgtagtcggacagctcccggtcggacagtccgtcaccggtcagtgcgtagaacattccgtatacattgccgaagtcgtctttcacgatgggggtgctcgctccgtcgggcagcagggcgcaggcgtcgctcaccttgcggcgcagcatgtcccagcactgctccacttcatcgtccggggtaatggtggtgagttctacctgtatcagggagaggtcgttgtacgagtagctttccacattatctatattgcccatgctgcggatgcttttctccagcacatccgtcacttccagctctacctggtgggcggatgcccccggataggtggttaccaccatggcgagtttcacttttatttcagggtcttccagcttgctcatctggtagcaggagaggatgccgcctacaaacaggacggtcaccaggaagtaaaccagattgcggtttttgaatgcccatttgcttatatccataattgctgagttttaaaggaaaacaatgctataacagtccgccgatgtttgtgtcgctggccgcaggcagaggagtcacggtttctccgtcctttatgtgatgtattcctgccgacaccacttggtcgccgggttgcagcccgtcggaagcgatgatgctgcgtccgttgctcagcaggcgtacgagggttacttcgcggctgtgtactttgctgtcggacgggttgtatacgaatacgcaggttttgccgtctttttgcaggacagcgctgccgggtacggagaggttgcgtgaactgtcattgttgcaaagaatggtaaccatggtgttcatgcctggagaaggaacggggcggttgtctgtaatcagttgcaggcgcatggtgtagagctggttcgcatttgctttgggggtgacgctgatgagtttcagctcataggtctgttccggataaatgtcgaacgtacagcggtatcggtcaaattgctcgcgccggatgtattcggctgccggaaggtttatttccacttccggggcgctgttgcttatcatggacaggacaggcattccggctcccaccgtttcgtgcgcttcaaacagccttttctgtatatagccgctgaaaggggcgtaaaggcgggtgtagcccaactggtctttgtgatgccggtatttggcggtgatttgtttcagtccgtacacggccttgtcgttggcattgggcgtggttccgttgtctttgtaaagcgccattacgcgttccgcctctgccttaatctgtttgtattcggcctcggtggcgtccagttgcacctggtagtctgtagggtccagttcggcaagcagctgtcctgcctgcacgcgggcgccgtcctttacatatatcttctgtatcgtgccgctcactctgaatgcgaggctgatgtcttgtgccgcttttacttttccgggatattgcaggctggtttgcccgccggcggagacaaccgtatctgtttttacggtctggtattctcgcgtgtctttagctccgttgctacaggataacagcgagtagagtgagatgcttgttaaaatccaataaattcgtttcataattcaaggtatattagttttgtgacaaaattactcagtctcttctatatataaaaggtttataagcattataaaatgttctgtttatgccctctctttgtaaaaaacggacattttcctgtctattgtgttctctggtattcggcaggagtcatgcctgttatccgtttgaagaacttcgagaaaaaggaagggttgggaaagttcagctcgtccgatatttggaatatcaacagattgctgtgtttcagcaatactttcgcttcaagaataacggattggttgatccattgcattaccgtctgtccgcttgcctcacgtataacggtgcttaggtaatgaggggtcaggcatagcttgccggcatagaagtcgacggaacgttcctgcttgctatgctcgtttacgagagctatgaagcgccggaatatttcttcctggcgtgaaaggcgcagcggggtggcggtacgcgtttgctcgtaagtatacttgaggttgtaaagcagggaaatgatgagatgctgtacggtttcgcggcggtagggcgaggaatggagtatattccacagcagggtaaagaacatctccgtctgtgtccactctttctcgttaaatgacagcacaatgccatttcccgtgtaagtttccgacaagatagaaccgggcagggcaggcaggaaattgcgtgcgggcattatgatttgaaaatcatagtcgggactgatttccagcagttctatcagggcattgtcggggataattatgattttgcgggcggatgcttcgtattcgatgaggttgatggagattcgccctgttccttgcaggacacggataatccgtccttctttggtacggtagggttgtccggtatggaacaatttgcttcccatttgcgtaaaactgatgaccatccccaagtcatcgtttatgaagcggtactcaagatgattgatgatgtccggtttatgacggatgtcatcgaatgcaacgcttatcggtctgcttttctccatatctataaacagtaagtaattcagtggcaaagataataaagtatccatatcgtttgtctttttcggtaaaaagtcgtactatcggaacatcattgccgacaaatggattgtaaacatactaagctgtgcgtctatctttgcattgtgctaaataaaataagaaacagatatggatgtaaaacaagcaattctctctttagcctttcttcttacggctgcattggctcatgcacaactgaccttggacgagtgccgacgtcaggcgcaggccaattatccgttggtgcgccggtacggactgatagaaaaggcatgtgaatatgatctttccaatgccggaaagggctatctgccccggttctcattgtcgggaaaggccacgtatcagagtgatataacccggctgcccgtcgagataccgggtattgatgtagagacagctcccaaagaccagtatcaggtgatgctcgaattgcagcaaaccatttgggacggcggggatatccgcaaccggaaacgtctgacacgtgcggcatcggatgtggacatggaaaagcagtatgtagatatgtacgcattgaacgaccgtatcaaccagctgtttttcggtatcctgctgctggacgaacaactgaagcagaaccggcttttgcaggatgatttgggacggacgcacaagcaggtgtctgactatatggcaaacggtatagctacccaaagcgatttggatgccgtcagtgtggagcagttgaatgccggacagcaccgcatcgaactggaaacatcgcgtcaggcatacgtaaacatgctttccgcttttataggaaaagaaatccctgccggaactgtttttcaaaagcctgcaccggaaagtaccgtcagtgtggcgggtgggataaataaccgtcctgaactccgccttttcgaggctcagacagaacagctcagcgtgcaggaagctacattgaatgcaagggtaatgccccgtttcgggcttttttgcagggtgcctacggcaatccggggctgaatatgctgaaagatgaattcagtgcatactatatggcaggtgtacgcatgtcgtggaatttcggcagcctctataccctgaagaacgaccgccgcaggatagacaacagccgccggcagatagaaacaagcagagacgtgtttctgttcaatacccgtttgcaggccacacagcaggatgcgggcgtattgtccatgcgcaggcaaatggcggatgatgatgaaattatccgcttgcgtgagaatatccgtcgtgcagccgaggccaaagtggagaacggaacgctgaccgttaccgacctgcttcgcgagataaccaatgagaatctggcatgccggaccaaggcattgcatgaagtgcaactgttgatgaatatctggcagttgaaatacactttgaataattgagattttagaattgatggtaacaataaaatcctatgatatgaaatcatttacattatttccagtattgttctttcttgtcgcttgcagcagcggtacacccgaatatgatgctacgggaactttcgaggctaccgatgtcgtagtctctgccgaagcgtccggaaagatactcggtctggatgtggaagaaggtactattttgaaagccgggcaggaagccggcattatcgacacagttcagctttatctgaaaaaactccagttggaagccggtgttaagtccgtggaagggcaacgccccgatattctgaaacaggtggcggcaaccaaagaacaaatcgttcaggcgcaacgcgaacgcgaccgtgtagccaatctgcttcgtgtaggtgcagccaatcagaagcagttggatgatgccgaatcactgcttaaggtactccgcaaacaacttgccgcacaaaactccacgttgcagaacagcgaccagagtctgacctggcagagttcgtcggtcggtattcaggttgcccaggttgaagaccagttaaagaaatgccacatcgttgctccgctgaccggaactgtccttgccaaatatgcagaagcgggagagctggccgcaccgggtactccgttgttcaagatggctgatatggaacagatttatctgcgtgcctatatcacttccgagcaactgtccgaggtgaagctggggcagaaagtgactgtatatgccgattacggtaaagatgtccggactgcatatccgggagtcgtcacctggatttcggacagttcagagtttactcccaaaacgattcttacgaaagatgaacgtgccaatctggtatatgccgttaaagtggccgtgaagaatgacggtatgttgaaaatcggaatgtatgggggagtggatttataattcgtcattcgataccgtcatggattttgcagtaactgtcgataatgtttttaaacgctacggccaggtggaagccttgcaaggcgtttcactgtccgtccgtccgggtgaacttttcggaatcatcggccctgacggtgcggggaaaacgtctctgttccgtattcttgccaccttgctgcttgccgatgaaggcaaggctacggtatgcgggctggatatggtgaaggattataaggctatccgccaacgggtagggtatatgcccggacgcttttctctctatcaggacctgacggtagaggagaacctgagtttcttcgctacggtttttcatactaccatcgaagagaattatgatttggtgcgtgacatctaccggcagatagaacctttccgcaagcgtcgtgccggagcattgtccggcggcatgaagcagaagcttgccctgagctgtgcgcttatccataaaccggatgtcctttttctggatgagcctactaccggtgtagatccggtttcgcgcaaggagttctgggagatacttcgccgcctcaaagaacagggtatcaccatcattgcctctactccaattgtggacgaggcacgtcaatgcgaccgtattgcctttatcaatgaaggccggatacatggcattgatactcccgactgcattctgaagcagtttgcagacatactttgtccttcgggactgttgcatgagaaagcggataaccgtgagaattacgtaatagaggtggatggactgacaaaacgtttcggtacttttacggctgtggaccatatctccttcaaagtccgtcaaggtgaaatattcggctttctgggagccaatggagccggtaagactactgctatgcgcatgctcacggggttaagtcgtcctacagacggtaaggcttgcgtggctggttttgatgttgccacccaatccgaagccgtgaagaagaatatcggctatatgagccagaagttttctttgtacgaagacctcaaggtatgggagaatatccgcctttttgccggtatctacggaatgcccgaagccgagattgctccgagaacagatgaattgcttcagcgcctgggtctggaaaaggaacgtaatacgctcgtaaagagcctgccgctgggctggaaacagaagctggctttctcagtctccatttttcatcatcccaggattgttttcctggatgaacctacagggggtgtcgatcctgccactcgccgccagttttgggaattgatttatcaggcagccgaccggggcatcaccgtttttgtcacgacccattttatggatgaggcagaatattgcgaccgtatttctatcatggtggacggcgtaatccgtgcgcttgacactcccgacagactgaaacggcagtttggagccgataccatggacgatgtgttccaacagttggctcgtgaggctgtaagaacggtagactgatacagatataaaattcaaaacagattgttatataaccatgaaacaattcatagcttttgtccgaaaagaattctttcacatcttccgcgaccggcgcacgatgctgattctgctgggtatgcccgttgtgcagataatccttttcggctttgccatcactacggaagtaaggaatgtgcgtgtggccgttctcgacccttccaatgatgccgtaacccgacgcataatcgatcgtgtggatgccagtgagtactttaccgttatccgccgtctgcattctcccgaagaagcagaacgctttttcaggagcggtgacattgatatggcaatagtctttagcgaacgtttctcggacaatctctataccggtgaggccggagtacagattatttccgatgccaccgaccctaatatggctaccatgcaggcgggatatgccacaaatatcatctccatggtcagacaggatatgcttccgcccggagtacgcgtatccgccattgtgccccaagtcaagctgctttataatccgcagatgaagagtgcctataattttgttcccggtgttatggggcttatcctgatgctgatttgcgcaatgatgacttccatctccatcgtgcgcgagaaggagacgggaactatggaagtgttgttggtttctcccgtaaagccgctgtttatcattcttgccaaagcagtgccgtactttgtgttgtcatttgtcaatctgattacgattctgctgctttcggtctatgtccttcatgttccggttgcaggcagcctgttttggctgattgccgtatcactgcttttcattttcgtatcattggctttgggactgcttatctccactgttacccgtacacaggtggcagctatgctggtatccggcttgatgctgatgatgcccactatgttgctttcgggaatgatatttcctattgagagcatgcctgccattttgcaaggtatttctacggtgattcccgcacgttggtatattcaagcggtacgcaaattgatgatagagggtgtggatatatcactggtgctgaccgaaatcggtatactgactgttatggcggtactcctgatagccgttagcttcaagaaattcaaaaaccggttggagtgaagttgttccgattataattattcaccggctggcaaagtcaacgtatccgtgtgttaaatatgtaagatgtgtcataaccgtagagcataaacagtagtatccttatgattaaatatctgatagaaaaagaattcaagcagttgttccgcaactcattcttgcctaagctgattttcatattcccttgtatgattatgatactgatgccttgggctgccaatctggagataaagaatatcaatctcaatgtcgtcgataatgaccgtagcgttgtgtcccgccgtctggtggataagctcggcgcttccacttatttccgtctgacagcgttgcccgatacgtatgatgaggctttgtacggtattgaggctggtacggcagatgttattttggagattccccgtgatttcgagaaagactggataaacggcaaagctccccgtctgcttgttgccgccaatgcggtgaacggaacaaaaggaagtttgggcggttcttatctttctgccatcatcggtgactatacccgtgaactgaagtcggaaatggctgtaagaccattggcagacaaaccacttccccgtatcggtatttccacattgaatctctataatcctacgctgaactataagctctttatggttcctgcacttatggtgatgctgctgacgctgatttgcggctttcttcccgcccttaatgtggtgggcgagaaagaggcgggtacaattgaacagatcaatgtgacaccggtcggtaaattcacgtttattactgccaaattgataccttattggctgataggttttgtggtacttaccatttgttttgtccttgcatggttgctttacggcattctgcctgccggacattttttcactatttacggttttgcgctgatatttctgccggttgtatccggattcggtctggttatatccaatcattcggcaacgttacagcaagccatgttcgttatgtggttctttatgcttgtacttattttgttgagcgggctttttacgccggtccatagtatgcccgaatgggcgcaatggattacccgtatcaatccgttgaggtattttgtagaggtgatgcgtacgatataccttcgcggcggtggttttgcggagttgcttccccaattgggtatcttgtccgtatttgctgtggcagctaatgtttgggcggtaaagagctacaggaaaagtaattgagaaagtcggtaaggtaattttctcctgattgttctgtgaaagcatggtcagtcattccttttttctatctttgcaggcaaattaatcaataccttataccgaatgaacacgcaaaactcttatcttgcttcaaagccgcattacgagatactcgatgggcttcgtggcgtagctgccgtaatggtagtcgcttttcatctgctggaagcgcattccggcggcaatcacttggaacaaattatcaatcacggttacctggcggtagattttttctttatgctttccggttttgttatcggttatgcctatgacgaccgctggagcaggatgagcatcggtactttcttcaagcggcgtattatccgtttgcatcctatggtgatagtgggaagcatagtgggtgcggtgttcttttattttcaggagtcgccctgctttccggctattcaggatacatcggcagggactatgctgctggtaatgctgctggggtgtacgctgcttccgcttcctttgaaatgggacattcgcggctggaccgagatgcatccgctcaacggaccggcctggtcgctttactacgaatacataggcaatattctttatgcattgttcatccgcaagttcagcaagacagctttatccgttctcgttgttgtggcgggatgttttacggtgcacctttgtcttaccgcacctgcaggtgatattgtcggcggctgggcgttgaattgggagcagcagtacgtagggcttgtccggttgatgtatcctttctttggcggattactgctgtctcgtctggggtggattgttcgtattgagaagcgtgcgttctggtggtgcagtctgatgattgtggcagttttggcatttccccgtctgggcggtgaaaatcattattggatgaacggactctatgaggcctgctgcattctttttgtctttcctgtgattgtgtccatgggggcgggaggtaaggtgacgggcaaacgttctaccgctgtgtgcaagtttctgggaaatatttcgtatccggtatacataacgcattatccgttggtgtatacctacacggcgtgggtgtgcaataataatgctactttagcggaaagcattccttatatgatactgacctttgccggtgctttcgtgcttgcctatgcctgtctgaaactctatgacgaacctatacgcaaatggctgacagaccgattcctgaaaggaaagaaaactgttaaaagttagttctcgtgtagtgaggtaaacgcatgtacaatgtaatccagttcaggtatgataaaaaagtcccgatgcagtttattcagaatctgcaccgggacttttctctaattaccagttatcttattttacgtcaatgaatcttttggccttttctttttcctgttcggaaaacttcggcaagtctatgttcaacacgccgttttctacttgtgcggaaatcttttctttgtctacatcgtccggaaggatcattgtctgttggaatttggagtatgagaattcgcgacgcagatagcggccttctttcttctcttccttgttttccgttttcttctccatgctgatgaccaagttgttttcttcgtcgatatggacgttgaagtcttctttggtcattccgggagctgccaactctaccttgtattccttttctgtttcaaatacgttgatggcgggagccgttgcattggcttttaccatccaatcgttatcaaagaaatcgttaaagatacttggtaaccaattctgagttcttcttacaggcatcataatcatagtctcctatctttaaaaagttatacattcgttttgctctgaacttcggttttcgatgttccccgatgtttgcctttcggctttcaccgtctgtatcttgaaccgtcgttcacttactgttatggcaaactgtatgccaactggtttgtactcactttattgactaattgtcattgttggtctgactattttacctgtataatgccaatattgctatctttttatttaaaattgattgaatttcatactaatttaaaacgcattcgccagcgcttgctttcttcgtcccagtcgtggctgataattttgaaagttcctatctcggaagtgttgacaacgtgtgtaccgatgcaaaggcattcgtcataatcaccgacttttactatacgtacggtttccgaagcatcttcgggtaaccgttccaaatcgaaccgtcctttggcttctgcctgagcgatgaactcggtagtgacaggcagatgccgtgctatcacttcatttaccgctttttccagactctctatttgctcttccgtggggcaggcattgagccgataatccaatttactttttttgcgttctatatgagcggagacggaacggccgcaaccgaataatctgatcattgtctgattaatgatgtgttcggtggtgtgcataggcgggtattcctgtttgttgtgctcattgagtttcgcttgttgttccataagttcttcttttaaaatactgtatacatgtatgtccgcatattctcccgaagccaataactctccggcccgttccgttccttcaaggcggaagccaagcctgacgggaatgccgttgcttgctacattgcccgtggcacaacgtatctgtatgcgttttatatttttggtttcgacggcccatcggcataggcggcggacacaatcggtcatgatgccctgatgctggtattcgggcagaagccagtaaccgatttccgtgcggtgattggcaaagtcggaaaaatgaaaacctatcagtccgcaaatttcattctctctgttccaaataccgaatataggttcgtagctgtcggcaggggcggagaggacccttttcagaaagttttcctcatcggctacggacttcaggttgtctacaaaaggcaaccatgtccgcatatagttgcggtgggtatctatggcatggtatatggcagcggcatcttctaccgttacttcacgcagcacaatatccggacggatttcaaaagatacatttaaatggttgaaaggctttgtctctttctgcctgtcctgtatcctttccttgagtttgctccaggcgtgggtgtcgaacaagcagctttcgcgcatggtgtgatacatctccttgaaccgggacatcggaatggtgaagcttaataactctgcctcgaaatgagggcggacagacgggtcgaagaatcccaaaaaggttcgtttgccttgtttccggttttcaaggatagcctgagtcactacggaacaacagcccgaaccgaaaggagctgatacggcatccgttgcattgctgtcgaaaaaagcccatgtggcaagtcctgccagcatgtccggcgtggcaagaaacaatatgccttccactttgtcgaaagaaccaatcttgtcgattcgtgcaaagtgcaggtaggctttttccgctttaggcacttgcaattcctgtatgaagtcaataaccatatcgggtgttttcttgtatttctctttcaaagagacgaagccgggcacatgttccggcatatccgtgaagcctgtgtagaacttgccgcctccacagcctattgtttcggcattgaggctgattatttttccgtttcttacttgcgccatgcttttaaagaagcacccgtttactttctctgccggagcttccggttggtcggagtaccaaaatacgatgggaagttcggcctgctgcccgaaagcttcccgataattgcctataaacgtatgtatatccattcccttctatttttcaccaaagataattaatattccgggaatttcttttccggtatgcgaaaatacggttttatgctaaccgatcagcgccatataagccagttctccgatgataaacaagctgactgcacctatcagaaccgcttcgcccagcaaataccctaatgctgcatgcaaaatagtgcagtggtatttggatatttcgctatgatgccgatgccgccaggctatcattccacacaaggcgggagcaacgaacagcaggaatatgaatcccgctgtcgatgctcccgaccacatgccgcttattcctaacagaatttccatgagcaaagttccgcagataagaaaaagcatgaataaggagaatttcggaatggcagttatctgctctctgcgcattttacggattaaccgtatgtaggctactactcctgcaatgggcaatgcaagaagaaaaagaaggatgatagtggccattatataggacaagattatcttcattttcggtaaatattatttttcttttccaaacagtaagtacatataattagctaatggagtattttattgatacaaactgatttaaactatttgcttctctcaaattaaaaggtactgacgagaacctttgatgcaaatatataagaaagaaaatataaaaccaaacaaccgattggtttttgaaaaataagaaagaaaaaccggaaaagtggctggaaaattaatcaggagtggacaggaaaaccgggagtgttataattgtttctgaatacgagatacattatgattcccgttaaagcatgctataaatagaggaaatggtggtaaaaggcactgcaacgtaaaaaagatggttccgaaaaaagaagcggatgaaatgcatgggcataaaaaaaggagtaccgctgtactccaacctttgttaaccttaaatctaatactatgaaaaacacgttgcaaagatacggacatttgataaatctgcaaattatccaagaaaaaaagcatgttttataacatttattataagattgaacttctttttcggacttgtttaatttttgttcggtattcttctcagagctgttttgtagttgtctgaggagtataacgggctatgtggcgaataaaaacaagagaacaagccggaaagagactcggaagaagcctgaataaaataaaattcttttttagcttgtaaatgtcaggggaaattgtgaatatttgtattataaaaatcataactctgctaagagcggtatatattaactgaattatcggtatatgatatgacaaataaacaaatgaatccggagagcattgacagaatagaacatagtacttatacgcctctggaaaagaaatatctgaaagtgcagtttgtcaaagtggcattggtttatctcggtcttatggctgtttcgctttttcttctttgtgcagaggggtttgcttaccggtatgccgctactatcattgttgaatgcggtttgcttgtagcatccgttgttaatttgctaattcttcccaaggcatacaactataaaggattcgttattcgtgagcacgatataacctttcgctccgggattatctttccttcggttattaccgttcctttctgtaaaattcagcaggtgagtgtttgtcagaatcctgttacacgtctgtttggactgtattccgttgacttggtaaacggagcccaattgttggctacaatcagaattcccggactgacggaagagagagcagataaagtgaaggcgcttgtcatagaaagtataaaaaatgaaaacaaatgatttctctgcgccgaggcgaatgagcaaaagcgcgttcgtaatattccttgtcaacaacctatggctttatgcgaagtattttctttttatagtcattcttgaattgtttaattcggaaaagaaattatcttttattgaagcggctttggattttttggttgttttggcaatctgtctgaccttggcagcagtcattgcttttatcaattattattccaaaaagtattatgtggagaatggaaatctgattttcattcacggtttggtacataaggaaattaccagtatatctttgacgaaaattcattctttgcgtactaaacagggattgatttatcgtttgctggatatgaagggagtatcatttgatacgcttgcatcgcaatcggaagaaatagaaatgattcttgacaatgaagattgggaagcattgctcagccggatagaaactttggatagtcagacacagatacaggcatccgaagcagataagattgaagagaaaaccgatggatacactaccaagttgagcgttggtaatttgaatctgattaaaggagcactttgtcaaaaccaccttcggggcatggttgtatttggaagtattttagttactttatatgaccagattatatcggtcgatgaaaatgctgtggaatatttttatggttacatggctacacatgccgatttcttacggctttcattatcaagttgtatcactgttgccgctatcttgtatatagttacattgctactatggttgggtaaagtctttttgcgctatttcaatatggatatacgtatagaccgggaacagctgttctttgagagcggactgatttcgcgtaatagcagccggttctcatacgataagatttgtactgtttatatcaagcggaatatcatagaaaaatggttggcttgcagcactgttatgctgaaacaggcattgaatgccactgacaggaatagaggagcggatgtcagaatttatggttcagactctgctacaacttttctggactggtggttgggaaaggattatgcatcttcgcaacctatcgtttctgctcaatccggatacggcttattaggctataccatccgattcgatctgttggtttcgcttgcagccggtatagccttatgctattttcaatattacggttggctttggctcccggtcgtttatatgctgatatccctgataaaagggatttttgccgtacgtcggagttctatcactttaaaagaggattatgtggaaatcaattcaggaaagtttgcagaagtgaaaaactatttcaaatattcgaacatggaagtggttcgcatgacagctactccttttactcctttttatcacagagtaaatcttgtcatttctaccaatggttcctcctttaccataagaagcctgaaagaacaagaagctaaggaaatctatgaattgctgctgtataattgctatatcaaatgaggctgatggaggcttgctgtttattccatcggcggaattatctgtgcacatatattaattccgccgttttttctctatctcttttttaggaatttcagcctttggcttcctggtacataaagcgtttgatactcttcttggcggtcttttcaaactcctcgaagtgtatttttactttggtaatctggcaatatgccggcagaagcaggttcagttcgttccggttggcttccattgccttctctatatcggtttgttgcaggccgtgggcaaaggcatcgtcgaagtcgggataaatcagggctacgagtttgtcatgctgcaatacaatcaacgactccgagacgtaaggcatgttattcagtttgctttctatctcttcgggatagatgttctgtccgctggaagtgagaagcatattcttgctgcgcccgcgtacggtaacgtagccgtcggcatccattgtggcgaggtcgcctgtgtgcagccagccgttgacatctataatttgggaagtggcttcggcattcttgtaatagcccagcataaggttgcttccccggcagatgatttcgcccgctacatgctgaggatcgggagaatctatctttacttccatgcgggtagtggcctttccgcacgaagcgagcttcagggtttcccagcggctagagcagatgataggaccgcattccgtcatgccgtaggcaatggtgtaggggaagcctatctgtttgaggaagcgttccacgtcggcgttgaaaggtgcgccgccgatgatgatttcatcgaaattgccgccgaagacatccatagcctttttgcgcatgtccgcttttatcttatcgttgacgataggcatccgtaacagcagcttgcctatcttgttgtctatgagtggcaggatgtttttcttgataatcttctctacgatgagcggcacgcaggatatgacgcgcggcttgatttcggagaatgactgcgcgataatctttggcgacggcatgcgggtgaggaaataaaggtgtgcacctgccgagaaaccgtaaagaaaatcgtagaccatgccgaaaacatgccccagagggagcatggatacgatatggtcgccgggacgtacgggcagcatttcgtggcaataggctatattggaccataagctgcggtagggcagcatcacgcctttggaatagccggtagtgccggacgtataattgataaccgccaactcttcgggcgactgttctttgcggtagcagatatgttcaggacggaagttcttaggatagcgcgtgccgtagatggcgttgcggtgttcgaaagcttccatgagccgttcgtcccggcagacaaccggagtaaaatccgtcagcaagacaactcccataagcaacggcatggcttcttcgttcaagttctcccaagcccggtcgccgacaaaaaggagtttggcttcggagtggttgacgatattatgtatgttgtctgctttgaattcgtgaagaataggaacgattacagcaccataagtcactgttgccaaaaagcaaaccgcccaatgggcactgttacgaccgcatacggctattttatcaccgggctggataccggcgctttccaatacgatatgaaatttagcgatcttgcgggcaacatctttatattgtagggttattccttgatagtctgtcagagcgtttctgtcccagttttgtatgatgctttgttcgatatagtcgatgaacagttgttcttgtttcatgcgtatatttgcacactttagttaaaactgcgcaaatatagggcttatagtgatgcaatgcaagtggtttaaagtttttttcatgagggtatgtcaaatttaaaattcgcttactatttgtttttttaggcatgggattacataggtttcacggaaaaagaataaagaaaatctgtgttttccgtataattccgtgcctaaaaaaacaaatagtgtattttctccctcttatttcctattctttggtcttttcagaaataagcagcaatttgtctcccacatgaagtttcagagtgccgttgggtatcaggtattcgttgtcgcgtttcactatcataacgagagttccctggggcaggttcatgtctttgagggtatcgcctttcgcgtcgagcatctcccgggtgacggttacatcgcgcaggtcggagtcgatatcttcgggcagttccactccgaagtcgttacctgtcttttccatcggggtggaaagccccatgatgcgtgctactttagagacggtagtaccttggatgacgagtgagaggatggtgatgaagaacacgatgttgaagattacatctgctcccggcacacctgccactaccggataggtagcgaagataatgggaaccgcgcctcgcaaccctacccaggacacaaacattttggacttcatattgatacgtttcccgaacgggagcaggcagaggaatatgctgagcggacgtcctatgacaatcatgaatacgccgatgagcaatgccacgactgccacttccagcatttcgtgcgggttcaccagcagaccgagacagaggaacatgatgatctggaaaagccatgtcagtccatccataaacgtgtaaatctctttgcggtgcatgattttgttgttacccaccatcatgccggcaatgtagacggcgaggtatccgttgcccttcatcagatcggtaatggagaaggtaaagaatacgaacgacaacagcagaatggggtagagcgactggttgtctatattcagcctgttgagcataaggatggccagcttgcccagcagatagccggcggcagcacctaccacaaattgtattacgaaagagaaagctatctgcgaagcacccatacccgaggactggatgagctggataagtacgacagtcagcatataggccatcgggtcgttgcttccgctttccaactccagcatgggacgcaggttgtgcttcaggttcatcttctgcgagcgcaggatggcgaataccgatgccgagtccgtagacgacatggtggaagccagcagcagggaggtgatgagcggcaagtggatattggtccagctcatgcccgacaaccaccatataaacagtccggtaaacagtgccgtcagcagcacaccgaaagtagacagtacaataccgggggagaggataggcttgatttcggtgaacttggtatccattccgcccgaaaacaggataatgctcaaagccaccataccgatgaactgcgcttctttggcgttgtggaattgcaatccgagtccgtcgctgccgaaaagcatgcccaccacaagaaaaagtaacaaggcgggaactccgaaacggtaaccggttttgcctacgatgatgctgacaaaaagtaaaatagaacctacaagtaaaatgttttcagctgtaaatagcataaatagtgtgttatgagttttattggaaaatgctttttgtacctttgtgtacaaagatattcattcttgacaacaaaaccaaaacttaattggttcaattaaatttcaatacaaaagttgtctcctttccggctatcagagagaggcttccgccggataagcgcatgatttgccgggagatgctcagtccgatgccgcttccgttttctttggtggtgaagaaaggaatgaaaatatgcccggcaatgtccggggggatggcagggccgttgttggatatttctatcagtacggcttcggcttcgttgcagtaggcgcgtatgttgatatgtttttccgtagtcgctgcgtttgtttccgctgttgtttccgcatttgtccccgttgctgccgtagcacccgtttcaaaagcctgtatggcatttttcagtaagtttatgatgacttgcgaaatgagattttcgtcggcatagagtatcaaatcgtcgggaacgatggaaacattgaacgtaaccggggtgtcgggatattgatggcgcgccagttccgccatacggttgatgaagcctttgaggtagaacagggacggttcgggagtggggatgcgcgtaaacctgcggtaggattctacgaaagcgagcaaccctttgcctgtggcactgattgtttgcagaccgtgccgcatctcttctttcgatatccgggcttcggtcagtttcagcagggtgtcgctcagggaagtgatgggggttacggcgttcatgatttcatgggtcagcacgcgtgtaaggcgtatccaagagtctatctccttttcgtccagttcgttgttgatgtcgttcagggcgaggatgcgcaggtgctcttggcgtacggtgatgtcgctgacgcggacagataggtttacggttccgcgttcgttgccgaatgccgcctggaacttgtcgccgggacggcaggcggtgagcgtatccgtcagatgggcgtccacgcgcgacagttggcggacgtgcgtaaatacttccagtccgagcaggcgcagggcttcgttgttcttttgatagacggctccgttgtcgttcagcacgatgataccggtgtttacacagtcgaggataagctcgtagtacttctcccgttgggcggtttcactctttacattatgcaggatacgggctacgcggttcagcgaacggtttacgaggcggttgtcttcggttccgtccgtttcggagaagtggatggcggtatcgttgttttcgatggcatcgagcatgaaaagaactttacgggtgtggcggcggtacaaccgctgctgccagtatactgccaaaggaagaagcacggtgaacaggacagcccagagcagagggtcgccccagccatgcgcacccggcggcttcagaaagaacagcgtccacattatgccggcagccgcggctgtgagcaggctgacgacagtccggaaaacgtaatattggctgatatccttaggtttttcaaagcccatacttcttcattttattgtaaagcgtctgccgggtaattcccagttgcgaggccaccgccgagagattgccaccgcacttgtccagcgtgtggcgtatcatttgcttttccatgtcttcaagagtggatgcggcgggcatttccggggcttcgttcctgcgttgcaactggaacaatccggcagagaggaatgcatcgtcgcagatgataacggccttctcgatggcatgttccagttcgcggatgttgccggaccaggggtgcagcatcagcttctcccgcgccgcattgtccagacgcaaggccggcttcccgtattgcttgcagaaacgtgtgatgaaacgctctgccagtgggatgatatcttcctgccgttcacgcagcgcagggatttcaagatggatggtgttgatgcggtagagcaggtcttcacggaattctcctttgtccgccatttcggacaggttgcggttggtggcgcagataaggcggatatctacgggaacaggcgtattgctgcccacccgcacgatgctgcggcgctggatggcggtcagcagtttggcttgcaggtgataggggagattgcctatttcatcgaggaagagcgtgctgtggtcggcaacctcgaactttccgggacggtcggcatgggcatcggtgaacgccccctttacatggccgaaaagctcgctttcaaaaaggctttcggtaatggcacccatgtccacgcttaccatttccttgcggtggcgtgcggagagggcatgtatctcgcgggcaagcatctctttgcccgtaccgttctcgccggtgatgaggatgttggcatcggtggccgctaccttttctaccagcatgcgaagctgctgcatgacggggctttctccccagtacatggaacaagcggtgcttgcaggcgtggttgctgttttcttcccggatgcaggggcgttttgtgcggcattcagcagggtttccactaactttccgttatcccagggcttgacgataaaatccgttgctccttcctttatcccccgtacggcaaggtctatgtcggcataggcggtgaacagcactacggggagcgccggatattgtttctttatttcgtgcagccaataaagcccctcgtttccggtattgatgccggatgtgaaattcatatcgagaagcactgcctgccaggtgtcttcgcgtaaggtggcgggaagggtgaccggtgaagaaaggacggttattttatcaaaataaggcttcaacagcagttgcaatgcggtgagtacgccgcgattgtcatcaacgataagaatgtttccggatttcttcatggcagaacgatgtcttgttatatttgtgagggcaaatatattctattttcccgagaaagaagggaaaggagaggaataattcggggactttttcattgggctttgctgcccggcaagacacatggatgtttttttataaggagcggaagtaacaaaagcagtagcagaagaggggctgcgctacgttccgcctcagggtacatgccgtaccacgacaaggtagatgtcataccacggtgtggtatacgttgtaccacggcatggtaggtgctgtaccaccgcagggtacatgccgtaccatagcgaggtacttcttgtaccaccgtgggatacatctcgtaccactgcaagatacagtcggcaaccttgcggtaactgtaatttcacttgaaagacatgccttacagcaactgtagcttcactccgaaagacaagctcaggtaatccttcggcttcaggtacttgttggtgaatgcgcttactatgtacaggtcgcaggtactgatttcgtagaacagcgtaatggcttttgccgtaaatctgcggcgcgggtcgatatcatacgtaatgcgttgtccgaggaaagcgtggatgcgtactttggatgagaaaccgtagtagcctttcggataacgatccggttcgttcacccagaattcatcgccgaacacggtgttgaagtacataccgcaggtaaggggttctgccgagaaccggctttccttgatttgcaggctccaggggatgtagttctgcttcaaggtaaatgtcagtttggtgcagtcggactgatatttgggcaggacacccagaaaaacatccgtttcccattggttgcgcttgccgtaatcccagcccgtacccagcgagaggagtcccatattgccggcaaactgtatcttggtgtgcgtcggaatcaaggcttcccaccgtttgcggtagcggtgcacgcgccggtcgtaccggctgtggcgtgtacggccggtaacgacggtgtcgggtttgcgttgcaggtaaaccgtatcgtgctttacgataatcaccgtatcccgttcctgtgcggaaagcgggctgcaccacagcaacagcaggcagatggcggcgagtgccggcagattagaaatagaccacttcgcgctcatatccttcgggtgttatggtgaatacatagtagttgcggttcttcatgcagtcgctcatgtagtacatgatgccgtcctcaaagaggttttcctcgaaaacgtggtgctcgtgggcggcagtgcagaactgtatgccgggaaattcggttacgtagcggtgaaagacgcgtgccacgttattgttgaactggtcggcatagggacgtacgtgcatggacacaacggttttgtcgaattcgtccttgcggtcggtaagctctttttcgaggaacgtgaagtcgggaatggggcgggagtagtcaaactccatggcgttggtgttgaggcatacaaacttcacccgtccggcaatgaatgagaagttagggtcaccgaatacggcgcggtatgtttcttctcccgtgccgaggcagtcgtggttgcctatcagggctacgtagggcacatggagcttgttcatgatgtcgcgctgccacagaaactcgtccgtcactccgaagtcgctcatgtcaccgccgtggataacgaagtcgatgtcatcgcgcttgtttatctctcccacgaagtccagcgtttcgtcgtaccagcgttgcgagtctcccatggtcacgaacttaatcgttgtcttgtccttgcatttctgctctatctccgcaatattatgggcgtttacatcggtttcaccgttgatgcgtacatcatacggatgatagtctatcatgtcgcaactgcccataagcaggcagaggaatgacagaagtaaaggtttatatggcttcatcataataactctatacagtctatatctatgaaagttgaattatctgtcagtatatatctatggaaactgagggcaaaggtaaagttttcattcgatagaaaagttgtcctattttccgtttttctgttctgtaagtgatgatttggctaatcaggccaggggttgcaaagaataaatgtctgtttatctgatttgtaggcaggcattaagcagatagtatttgattattcggcaggtggtgtctaattattggacgggtggtgtctaataattagacacctgtatatggattatttatgcgggattgcctgataatcaaagccataactcctttggcacgctttctgcattattataggcaggaaaacatggcggcaagccacgtatttccgatactgtaggtttacgaattataaattagtatacgatgaaacaaatctattatgtcattcaaaccctgcttcggggacgcggctcgaatatcatcaagataatctccttgggattaagcctgacgatgagtatcctgctgttctcccgcgtggcgtacgagcagagtttcgacacctgctacaaagactacgacaatctctaccaaatctggtcggtatttaccgttaagggcgagaagtacccgccgcaggagcagaattgcggccctgtggcgggcgccatactggagaactttcccgaacaggtggaagctgctaccagcacctgccattggatgaatgccccgttatataatgaaaacgcccgttttgacgaaagaaagatagtggcggattcactctttttcaagacaatgggtatcgaagtgctgagcggtaatccggtgaaagaccttcagcagcccaatgtaattttcctaagcgaccgctttgccgggaaaatattcggcggagagaatccggtgggaaagaccgtcaactacaatcacgagaaagactttacggtgaaaggtacttatgaggcattgcccgaaaatgcaaccgtccatcctgaagccgttatctctatgcccaccttgtggaacgacggagtcggcaactactcatggcgcgggggagacagttatcccgaatacatccgtttccgtcccggtgcggacaagtcggtggtgaatgcgcgtatagacgctatgatagagaaatatcgcccggaagaggacaaaaagaagtatggctatacggcgtttgtaaagcctatccgtgacacctaccgcaattacgaaagcgtagagcggatgcgtaatatcatgaccgtcctcggccttgccattcttttcattgcggcgctgaactacgtgctgatttccatttcctcacttacataccgtgccaaagcggtaggcgtgcataaatgcaacggggcaagcggcggcaagatattcggcatgttccttttggaaacgggcattatcattgcggcggcgttgctcctgatggctttggtgctgctgaatttccgggagttctttgaagataccgctgcggcgaaactttctttgctgcttgctccggaacgcatctgggttccgctgacggtggtcggcatactgtttatggtgggcggagtattgccgggacgtttgtttgcccgtattcccgtatcccaagtgttccgccgctataccgaagggaagaaaggctggaagcgtccgctgcttttcatccagtttgcaggggtggcattcatttgcggacttatgtgcgtggtgatggtgcagtatcaatatgtgctgaacaaggatatggggtataatccgcagcggatggcatttgccaatgcctattggaacgaggataaagagagtgatgccgctctccggttctttaaagggcttccttatgtagaggcggtgaccagtgccaacaatacacctgtcagcggatatagcggctctatgattcgtgacgcatcgggcaatgtgcttttttccacacgtgcctgttactatatgcgggaggactatccggcaatgatgggcatggcgttcaaggcggggcgtatggcacgtacgaaagatgagataattgtaaatgaaacatttgcggacatgatgcattggggaaacgatgccgtggggcgtaccgtcgatgtagacaatgctgcacagatgaaagtggcgggggtgctgaaagatttccagataggggatttcacggaagccaagatgccttttgtcgcccgctataatcaacattttacggggacggtacatgtccgtttgaaagaaccttttgtacagaacctgcggcaactgaacaaggatgcagccgatgccttcggcaatcagaccatcgacttcgtcagctatgaaaagcagattaccgattcctacaacagtgtccgcgtgttccgcaatgccacactgatggcggccgtaacgatgttcttcgtcatgctgatggggctgataggatatactgccgatgaagtacgccgtcgcggcaaggagattgccatccgcaaggtcaacggtgcggaagcatcctctatcctggaattgctttccaaagacgtgcttgtcgtagcattgccggcagttgttctcggaactcttgcatcgtggtatattaacggtatctggatggagcagtttgccgagcaggttcctctcggttgggttgtatatctgctggtggtaatcgccaatctggcggtaatcgtaggttgcgtcctttggaagtcctggcggatagccaacgagaaccctgtgaacagtatcaagagtgaataaaaaagcgtataacatagaaaaacaaaacaatatgattaagataaacgacatcagtaaagtattccgtacctcggaagtggagacggtagcgttgaaccatgtaaacctcgaagtgaaagaaggggaatttgtagccatcatgggcccgtccggttgcggcaagtctaccttattgaatatactcggcctgctggacaatcctacggaaggcagttataagttgctcgggcaggaagtggcggacctgaaagagaaagaacgtacccgcgtgcgcaaaggcaagttgggattcgtgttccaaagtttcaacctgatagatgagttgaacgtttacgaaaatgtagaactgcctcttacctatttgggcgtgaaagcgggtgaacgcaagcgcatggtagatgatatcctgaaacggatgaacatcagccaccgtgccaagcactttccgcaacagctttccggcggtcagcagcagcgtgtagccattgcccgcgccgtggtgacgaacccgaaactgattcttgccgatgagcctaccggtaacctggactccaagaacggtgcggaagtgatgaacctgctgacggaactgaaccgggaaggcactaccattgtcatggtgacgcactcccggcacgatgcctcgtttgcacaccgtacggtacacttgttcgacggcagtgtggtggcgagcgtagcctcgaacgatttataaggattaagactggagaggagacaacctcttcagtttctttacatatatccacagggcaacgaccgccgtaacgaatgcaaagaagtccgatacgggcatacacgtccagataccgtccagccccatgtagcggggcaggataatcagtcccggcagcaggtacaacaactgccgggtaagggacaggaatatgctgattttcgccttgccgatgctttggaagaagttgccgataacgatttgcgcacctaccagcgggaacatggctatgccgatacgcactcctctggaagccatgtcaatcagttgcccgtcactggtaaagacagccgatacggcatgcggaaacagttcgcagatgataaagcccgtactggtgatgcacacgcccgtaaggatgctcaggcgtagcgtagcctttacgcggtcgtacttctgtgctccgaagttgtagcccacgatgggctgcatgcccatggtcagtcccagtacaatcattacgtacagcaccagcaaccggttcatgatgccgtaagcgccgatagccatgtcgccgccgtaacgttgcaggctgttgttgacgatgatgacgatgacgcatgccgttacattcatcaggaacggagacatccctatggagaaaatgctgctgataatgcgctttttcatcttccagaaacccggttgcaagcgtacgatgcttgtcttttgcaggaagtggcttactacccatatcatgccgataaattgcgaaatgaccgttgccgttgctgcgccgcggataccccagtcgaagtggaagatgaagataggggcgagaataatgttgcacaccaccgtaaccatcgaagtcagcatcgctttcttgggataccccgtggcacgcatgatgttgttcaatcctatcattgtatatgtcaccggcgtacccaacaggattatctgcataaagttccgtgcatacggcagcgtttcgttgctggcaccgaaaaagcgcaggatttcgtccaggaagataaaggagatgccgccgaacaggaatgcgttgacaaggcacagcatcagggtgtggttcagcacttctgtggctccgtccgtatctttctgccctaggcgtatggatgatatggtggagccgcctgccgagactaccgtacagaaagcgaccaccaggttcatcagcggaaaggtgatggcaagcccggcaatacccatggcgcctacgccatgaccgatgaatatactgtcgatgatattatataacgaagtaattgtcataccgataatggcagggatggaatactgcacaagcagtttgcctattcgttcggttcccaaaatatgcggatcgttcattggatatacgtcaattaagtgtttgcaaagatagtgaaagcttcctatcttatcaaaagataatgaatatttgctcagttcgatgattattcagacctttgcgcccgaatattatatttgtttttttaatatggatacaacaaaaacaacggccgtcctgttcgatttcgacggagtggtaatggataccgaaacgcagtattccgtcttttggcataaagcgggggtggactatctgggcatggacgatttggagagccgcataaaggggcagaccatgacctacatctacgacactttctttgccggaaagacaaaggaacagcaggaaatcaccaccgccctcaacgcttttgagcgggacatggcgtatgattacatccccggtgtgctcgatttcattgccgacctgcgccgtaaccacgtgaaaatggcggttgtcaccagttccaacgaccggaaaatggctgccgtctaccgtgcccgccccgaggtaaggacaatgttcgaccggattcttaccgcagagatgttttcccgttcaaagccggctcccgactgcttcctgctcggtatggaagtattcggcacgactcccggcagcacctatgtattcgaggactcctttaacggactgaaagcgggcatggcatccgaagccaccgtgataggactggcaacgaccaactcccgtgaggctatagctccgttatgtcattgtgtattggatgattttacgggattcacttacgataaaatgcttcaagtgcacaagtaatgggaaaaaacgctaactttgcgcgctattttaattgataactcattaacacattcattaagattatggctggatatatttcagacgacactcgtaaagtaactacgcatcgccttgttgagatgaaacagagaggcgaaaaaatatcgatgctgacctcgtacgactataccatggcgcagattgttgacggcgcaggtatggacgtcatcctggtgggcgactccgcttccaacgtaatggcgggtaacgtgactacactgcccataaccctcgaccagatgatttatcatgccaagtccgtcgtgcgcggcgtaaagcgcgcaatggtagtggtggatatgcctttcggctcttatcagggaaacgaaatggaaggtcttgcatctgccatccgcatcatgaaggagagccatgccgatgccctgaagctggaaggcggggaagaaatcatcggtacggtaaaacgcattctcagcgcaggtattcctattatgggacacctcggactgatgcctcagtctatcaacaagtacggaacatacacggtacgcgccaaggacgatgccgaagcggagaagctggtacgcgacgcccacctgctggaagaagccggatgctttgcccttgtactggagaagattcccgctgcgttggcagagcgtgtggcaggcgagctgactattcccgtcatcggcatcggcgccggtagcggcgtggacggccaggtgctggtagtacaggatatgctgggcatgaacaacggtttccgcccccgtttcctgcgccgttatgccgacctgcatactgtaatgaccgatgctatcagccattacatttccgatgtgaagaacttagacttcccgaatgagaaagaacagtactgacaggcttatgacgctgaacttctggcggatgtgcacagctaatctgctactgttcgcatccgtctacatgctttttcccgtactttcgttcgtaatgccggagcagttgggaatgtccgtttcccggacaggcgacatgtttctggcattcattgcggcgatgtttgcggcaggcccgtttcatgcctatctgtgcgatgagtataagcggaagaacgtattgctttcttctgctttcgtcatgctggctgcaatggcagggtatgcctttgccgacagctatctcaagctgatgctgcttgcttcggtacagggcgtatgcttcggactggcaacgacggcgggcattacggtggctatcgacattaccacatctacaaggcgcagtgccggcaatatgatttatgcgtggtctgcccggctgggtatgctggcaggggcgtgcgcaggcttcctgctgtacgacctttacggtttccgcacggttgtttatgtagccgttgccgtgggagttctcggcatgtatttcgcatcgagggtatatgtggctttccgtgcgcctatcgggatgaggctgtgcagcctggaccgcttcctgctgccgcgtgcatgggttcctgcgctgaatatgctgctgatagctttcgtgccgggcgtattgctgccattgctctatataggcgactacattgcattcctggcattggcggcgttgacgtttctgacgctgccgtttacaaggatgttcgtaaagctgtctcatcactgccagcggggaacgggcaacacgacttgccacctggttatggaaaccggacttctggcgggtctggcaacggcttgccgcctggcagatgcattcctgctttaccacgccgccggtgtagccgccatacttgccttattcttcttcgtcctgctgacgtatccctactataaaaggaaaagggtaagataacgtctgcctttaaagatacggtataaagattatcaatcctataattgccgccgcaacagcgcacaccagcactgctccggcggcaatgtcttttacctgccccgcaatggggtgccgttcgggagataccaggtccaccagcctttcgatagctgtgttgaacagctcggcggcaatcaccacaccgaaacagaggataacgaccgtccattccgtgcgtgtaatgcctaaaacaaatcccgcaagggttactgccgccatggcaatcagatgaaaactcaggttctgctccttgcctgcgcagctccggatgccctgccaggcataaccgaaactgcggagctgttttttgaaatcgtatcgcatagttggtaaattgagtcttgagaattaaaacattgagaaataagggcgggggagacgcagtgttggactttggaaacgtagagttctactttaggattgtaaagtagaactttagcgtcgccaagtagcactttagaaacgtagtgtagcactttacggtccgcaatgttgaacttgggatttaccccgtcagttgcgcgatacctgctttactccctttaccgtcctcagcttcttgatgagcgcttccagtcttccggtgtcgcctaccatgatggtaagcgttcccgagaataatccgtcgtgcgagtctatgccgatgcttcgcagcgtaatgccggtctctttggagatgatggaagtgatattggtaacgatgcctatgtcgtcgtgccccaccacacgcagcgtaatggggtattgcgtgccttgcgacttgcctgcccagcgtgcctttacgatgcggtatccgaagcgttcgcgcaagtcacttgcattcggacagtcgcagcggtgtatcttgatgcctccgcttacggttacgaaaccgaatacctcatctccgtagataggattgcagcagcgtgccagcttgaaatccaaccctttcaggttctggtcgatgacgagcacgtcctctttggcggtggtctcttcgggcagggcggcagcctgcaggttatagccttcggcgctgcggtacacgatgtcgtcgtgcgtgtcgttctcccgtttctggagttcgaggtacttgtcgatgatgccgttcacgtcgagcgtttcatcggcaatgctctggtagaagtccgtcaccaccttgaagccgagccgcttgatgaggcgcatcatcgtaccctcgtcatactctattttccggttcttgaacttacgttccaatgtctccttggcaaaggcgtgctggcgggcagccatttccttgagcgcctgccgtatcttggtgcgcgccttggaagtggtgacgatgttcagccagtcctgcttgggcgtctgtgtattggacgtcatgatttccacctggtcgccgctgttcagtatctgcttcaactgtgcgttcttgccgtttaccttggctcctatacatttgcagcccagcttgctgtggatgtggaaggcgaagtcgagcacggtggaacccttgcccagtttgaacaagtctcccttgggggtaaagacgaacacttcgtcttcgtataaatccagcttgaactggtccatggtctccagtccgctgctgtcggaattctccagcgcttcacgtacggaagtcagccattcgtccagtccgctttcgcctttcacgcccttgtaccgccagtgggcggcaagcccccgttcggctatctcgtccatgcgttcggtgcgtatctgcacttccacccatttgccttcaggccccatgacggtgatgtgcagcgattcgtagccgttgctcttgggcacggacagccagtcgcgcagacgcttcgggttgggctggtacatatccgttacaatggaatatgcctgccagcactccagcttctccttttccacttgggagtccagaattacacggatggcaaacaggtcgtacacaccctcgaaaggacacttctgcttcttcatcttctggtagatggagtggatggatttggtgcgccccttgatgtgaaagtgcagtcccgcctcttccagcttcttctgtaccggagcgatgaaagcggctatatacttgtcgcgcgatgccttggtttcgttcagtttctccttgatgtggtagtagacttccttctccgtgtacttcagcgaaaggtcttccagttccgacttcagtttgtacagacccagcttatgggcgaggggagcgtacagataggcggcttcattggccacctgcctgcgtgcttcgtcgttctcgcactcctttatctggcgcatgatgttcacgcggtcggcaatcatgatgaggataacgcgcatgtcctctgcaaaggacagcagcaggttgcggaagttctccgactcgatggtggggcttttggcgtaaagttcgtttacccgtatcagtccgcgtatgatgcccgccacatcctcgccgtagttccgttccacttcttcggcggtacaggtgccgcagcgcacggagtcgtggagcatcagtcccaggatggatgcccgcctcatgcctatctcttccgccacgataacggcggtctgcatatcctttataatcgggttcagcccgaagatatcccgctgtatgcggttgttctgtatagagtttacaagatgtgttttcagctttctgcaatcgcccttgcggagcgtctctccggaaagctgcaataattttcggtagagcacgaagagcaaacgcttctcttcggctgtgaaaaattcatctgtttccataattgtccgtattttctgctgtaaaggtagtttttttcttccttttcatgacggtgcttgtgctttttttgtatttttgggcatcaattaattaatttagatattatgataacactccaagacaaagaactacttgccaagaaaggcatatcggaagaacagatagccgaacagctggcctgcttcgaaaagggatttccatatttaaagttgtctgccgctgcttccgtggagcagggtatactggctccggatgccgatgagcagaaaaaatatctgaatgcgtgggaagcatatactcagacagacaaaacggtggtgaaatttgttccggcatcgggcgcggcaagccgtatgtttaagaatttatttgaattcctcggagcggaatacgatgctccgcagtcggactttgagaaaacattcttcgggaaaatcgggaagttcgctttctatgacgacctgaacgccgcttgcctgaaaacaaccagcaaggatattcccgctctgattgccgccggcaattacaaggcggtggttgccgccctgctcgaatcggcaggattgaattacggcgcgcttccgaaaggattgctgaagtttcataaatacgaggacggcagccgtaccccgctcgaagaacatctggtggaaggtgcgctttatgctgccaacaagagcggtaaggtaaacgtgcacttcaccgtatctcccgaacaccgtgcgctgttcaaggcgttggtagacgagaaagccgcggcttatgccagaaagtacggcgtggattacaacatcagcttctccgagcagaaaccgagcaccgataccgttgccgccgatatggagaacaagcctttccgcgataacggcaagcttctgttccgtccgggcggtcacggcgcattgatagagaacctgaacgacctcgatgccgatgtcatcttcattaagaacatcgacaacgtagtgcccgataaactgaaaggcgataccgtattatataagaagctgattgccggtgtgctcatcaccttgcagcagcaggcttttgcctatctgcaactgctggacagcggcaagtacacgcacgagcaggttctcgacatcctgcagtttgtacagaagaagctgttctgcaagaaccccgaaacgaagaatctggaagatgccgaactggtgatttacctgaaagagaagctgaaccgtccgatgcgtgtctgcggcatggtgaagaacgtaggcgagccgggtggcggtccgttccttgcttacaacagcgacggtacgatttccctgcaaatcctcgaaagttctcagattgacatgaatgaccctgagaagaaggatatgtttgaaaaaggtacgcacttcaatccggtagacctggtatgtgcagtgcgcgactataagggccataagttcgatttggtgaagtatgtggacaaggctacgggcttcatctcctataagtcgaagaacggcaaagacctgaaagctctggaacttcccggattgtggaacggtgccatgagcgactggaatacggtctttgtagaagtacctctgactacattcaatccggtaaagacggtgaatgacctgttgagagaacagcaccagtgatgataactgcaagttgacggtttacggtttactatttccgcagtgcggtggcggtaggccgtaaatcgtcagttttatgcctgaacatccaataataaacaacaaattgccaattatagaaaacaataataataggtagtaaataaattagtaaccgatgaaaaagattttactgttaggttccggtgaactgggtaaagagtttgtaatttcagctcaacgtaaagggcaatatatcatagcctgcgactcttacgccggagcacccgccatgcaggtggcggacgagtgcgaagtgttcagcatgctggacggggaagcattggaacgtgtggtgcgtaaacaccggccggacattatagtacccgaaatagaggctatccgtacggaacgcctgtacgatttcgagaaagaaggtattcaggttgtgcccagcgcgcgtgcggtcaactttacaatgaaccgtaaggctatccgcgaccttgctgccaaggaactgggactgaaaacagccagatacttctatgccaaatccctggatgagctgaaggctgctgccgaaaaaatcggtttcccctgtgtggtaaagccgctgatgtcctcttccggtaaggggcagtcgctcgtaaagagtgccgacgaactggagcatgcctgggagtacggctgcaacggaagccgtggcgacatcaaggagcttatcattgaggagtttatcaagttcgatagtgaaatcaccttgctgacggttacccaaaagaatggccctaccttgttctgcccgcctatcggacatgtgcagaaaggcggcgactatcgcgagagctttcagcctgcccatatcgaccctgctcatttaaaggaagcgcaggatatggcggagaaagtgacccgtgccctgaccggcgccggtttgtggggagtggaattcttcctgagccacgagaacggcgtttacttctccgaactctctccgcgtccgcacgatacgggtatggtgacactggcaggaacacagaacctgaacgaatttgaattgcattgccgcgccgtactcggtttgcccattccgggtatcaagcaggagcggataggggcgagtgccgttattctttcgcccattgccagtcaggagcgtcccaactaccgcggcatggaagaggtgaccaaagaagaagatacttacttgcgtatcttcggcaagcctaccacccgcgtcaatcgccgtatgggtgttgtattgtgctatgccccgttggacagcgacctcgatgcgctgcgcgataaagccaaacggatagccgcgaaagtagaagtgtactgagtttaagtataaaatataaagtatgaggtataaccgtgctccatccgcatggttatacctcatacttttatgcttaattaaagagtcccgggtaaatctctccgcccagttcactcacattcagttgccgttgcagctttccgtccggtgcatagaacagttggaattcttcaccggagttgtagccttccacttcgataacgattaccgcaggacgtttgggaaacgtgactatccttacatccctcaatctcatggaagccataatgctttccataaatgcttccgcaacgggagcgggaactttctccagcgactccacatcattctccatcattacccattgggcattttcatcgaaccacacatctgtttccctgccgtcaataacgaattctgctacgtaacatcctgccatctgttcccactgggcatttgcaacatacgggtacatcttttcgaaagcagcctgtatgcttgtgggaactcctttggcaacggtggaaacggaaataaacagtagcatgcctgctaccaaacaaaatctgaatcttttcatcctgaaattaagtatgaagtataaaatatagggtataacaatgtcccgtccgcatggttcattcctcatactttatatttcatacttttaaacggtcagtttccctttatatacgaatgctttttcaccgaagtctacatccggcaatacggcatccgccgcaaacagtccgtacaccgatgaacccgaaccgctcatcgaagcatagacagcaccttgccggtacatttcttccttgattgccccgatagcgggaaactgcgggaacacgctctcttcgaagtcattcaccatatactctttccatgcttcaacgggcaactgcaccgtttccttcagtgaccgttccggacggtgcggctttatttgtgagaaagcatcccgtgtggaaacgaatatatccggttttaccaaccaaagctgataccctttcagcgacaaggatacaggcgagaacacatttccgatgccttccgcataggtaggagcattccggatgaagaaagcgcaatccgctcccaggcgggcggcatactcttccagagtcccggtactcagtccaaggccgaacttctcattcagcattttcagcataaatgcagcatctgccgagccgccacccaatccggcccccgatgggatatgcttgaacagatgaatatccaccggcggcaggtcgaacaatccgtccagcagcttatacgctttcaccacgaggttgttttccgcttctcccgctatttccatacctgcctgatgcaggcagtattttccgtcaccctcgcgcagcgggtttatttccagcgcatcttccacgggaatagggtagaagatggtctccaggttatggtaaccgtccggtcgtttttctgtaatattcagtcccaggtttattttagcattcggaaaagtaagcattgttaaattgagaattaagaattgaaaattaaaaaataaaaacgggcctgtcaaagcaggcttcggagacaaagttaatgaattctgttcatagtagattgaaaacttaacaacgatttgttgattgctatcaataaaatcatttatctttgctttcccttttgaaaggcggactatttatttcttaatttttaaatttcaattcttaattcataaagtggcagaacaaagacgaacaacccgcaccccgaagtcgaaatcaccccagccggtcaacgattacgggcgtatccagccgcaggcgccggaactggaagaagccgttttgggtgcattgatgatcgagaaagacgcttattcgctggtgagcgaaattctccgtcccgaatctttttacgaacaccggcatcagctgatatactccgctatcacagaccttgccgtcaatcagaaaccggtggacattctcaccgtgaaggagcagcttgccaagcgcggagatttggaagaggtgggcggcccgttctacatcacccagctcagcagcaaggtggcatcctctgcgcatatcgagtatcacgcccgtatcattgcccaaaaggcgttggcgcgtgagctgataactttcaccagtaacatacagtccaaagcattcgacgagacgctcgatgtggacgacctgatgcaggaagccgaaggcaagctcttcgagatttcgcagcagaacatgaagaaggactatacgcaaatcaatccggtcattgccgaagcgtacgaccttattcagaaagccgccgcccgtaccgacggtttgagcggtcttgagagcggatttacgaaactggacaagatgacttccggctggcagaactccgacctcattatcatagccgcccgtcctgccatgggtaagacggcgttcgtgctctccatggcgaagaacattgccgtgaacttccgcaatcccgttgccttgttctcccttgaaatgagcaacgtacagttggtgaaccgtcttatctccaacgtgtgcgagataccgagcgagaaaatcaaaagcggacagcttgccgattacgaatggcagcagttggactataagctgcgcgacctgctggatgcgcctctgtacgtggatgatactccctcgctttccgtattcgaacttcgtaccaaggcccgccgtctggttcgcgagcatggggtgaaggtaattattatcgactacctgcaattgatgaatgccagcggcatgtcgttcggcagccgtcaggaagaggtgagtacgatttcgcgttctttgaaggggttggccaaggagttgaacattcccattattgccttgtctcagttgaaccgtggtgtagagaaccgtgagggggaagagggcaagcgtccgcagttgagcgaccttcgcgagtccggagccatcgagcaggatgccgatatggtgtgcttcatccaccgtcccgaatattacaagatttatacttccgccgacggcacagacctgcgcggcatggcggaaattatcatagccaagcaccgtaacggtgccgtgggcgatgtgcgcctgcgctttatcggccagtacacccgcttccagaatccggaagacgatatggttattccgccgcctaccgagggtatgggaggagccacgttcggttcgcgtatgaatgcgcccattggcagtccctctacaccaccgcctccgtctgcctccgactatatgcctcaaacggacaatccgtttggcggggtgggattggacgggcctgtaccgttttaatggcattgggcagcttacatgaaaaaatgtctgttatatatatgtattagttttactgttacgattatatcggctttggatatgtaggtctatataaaatagtcttccccgcacttcacagtgcagggaagacacagcaaacaaacaaaacatttccgatttgaataggggatattcttatcggatggttttgtctatggtttaatcttggacacaacgtattgtaaatgcgtgattccttgcatttacggatgctggtggagtatagccaacagcgaaacctaaataatacgatgatgtatttccgctatatacactactgctccaataataacctcctgcaccggtacgatactgttttttgtcagcagcatgccagtaaccggaggcaggaaaacgagttacaccgtcagtgaaagtataagttttgtaaccgtttatagtactggttccataaatgttggtagaaaggtctccccaatttccatttgttgtatatttgtcaatatctccaaactctttgtaagtaggcatacgccaactgcctgtaacagcaccagtcttgcttaaatatcggcaaatatcacctttataggcttgataaaattcatcagtattgagagcattatcattcaagtaggtattgtttgggtcaatactgttacttaaaacttcattgtaaaagcaataaatagagttaaagtcgtatgatttgcaatcccaagtactattttggggagaggtaggattatatatcggaatataatatgcacttggagcagagtttcccgaagatggtatacctattagtgacccccaacggaagtgtacaccttgttttaaatcggaatcattggatatagcagtatcaaatgtaagtttgctgccgtcccaataaatattgcttcctgcccagataatgctactttttttgtatgtaacccgtgtgtcggtagttgtgggtttgagtgtaatattataagtatagttacagttacgtttgatattgaaatttgttgtagtggtagctccaagatatatttcccaggacagaaatttatatccggtggctttgccgtaaattacaacataggttgcagaatccggtgcgtttgcttttattttttctttttgctgggttattgtggtatttattcctgcccgattttcgaacatgtagaatattgtatttatgtttgtaggggagttcggggaaatacttccactgtctgtccaatccgtcggttgggaagggatagccgcatcttttgcccgggttgtttgtgtatcggttggttcggattcagtgtctaacgggtgtaatacatagtacgttttatttggaatgccataaatgcggtaactgtcaatgttgattccgtaaccttgatctatatttacatttagtgtgatttttgcagctattcgttttactgttatatccggaagcgaattgtttccagtagctatatttatgtggctttggcttcctgtcataggcaatacattgttttttgtcagactgttccaatcatagagagagtaagtcttgtttttcagattgttttcccaatgaatgtcatagctgttgaagagttccggagttcctgtatttgcaatagcataaatggtacaatcagtagcgctgtgggtatttattgtaactgtattgttcgtggtatatttttgtccaatcaaatttccattgctgtcatatataagtatatgtaagtccttgatgagattctcttccactcgtgtcgttgcgtctgtttgttgttcactttttacatgcaggtatattatggcagatgcttcttttgcatctttgatacaggcatcttgttggcaagaagtgcatattactgcttgtatcaacaaaacagttgttagtgataatgctgtaagtacttttaaacgaaaagaggtggagatgctcatattgctatataatttactcagatgacttaatcatttacaattctgtatcttgatgaatattctcccaaggcagtacatccattgttatcaaaggaggagtataatgaaagtctatattgatatctgtttgtttaccggcaggtgcatgtaatttcttgaagctgttgtcttgtgttatagtgtatattatttcatgttcccggtatatgtctatttctatgtattcctcttgtgcggtaggaaatattcggaaaggaagtgtatatacatctccttgtttgtctgtgtatgatacgggtttatatcctgcacttttaccggtaatctttcctgtaaaattcacttctgttcctgtgcctctgacgatgagcgtatacggtttcccattatatgggcaatgttttgtcagataattggtacgtatattcaggcttgctgacatacgttccataaccagtgttagatattctacctgtctgcttcttgtagttgcattgttcacttcctttttgcaatagaaaatatcagtaatgggcaaatgacttccttctgtatcttctctgagtcggaaacgtgcttcttcgatagtagtgcctatgggaatatcgggagcaattaaggtatctttctttatatttccccataccacgagggtaagcctttcgtttttatcatctctgaaaatcagatcagatgaaatatctgtgggtattttccttataaatcctttctcgttgaatagatagacttccactttttgcaaggcgtctgttgcagtgaggtcgtttccctcggagtctacagcttgcatatcgagcacatattgtatgcagtctccggtgtcttcccgcacgcatgatgtgtacagaaaggtgagactaacatacaatatcgtgaataggaatatgcgggcaggcttcatggcggttgttctgaacttttgaatatttggtaattattcgaatgtcacgtcctgcgtgatgttcagtgcccagtcggctacactcactgtcagttcgagtgaagtagggtttatctctccggtggggtcatcggttcctatattcttgatagttgccttgatggcataggtcgtgttgcgggcaatgtttgaagtacccgtgcccgaagctccggtgatatttgttccggtctggctcttgttgacgattatcggataatagatggtggttcctgcatcacttgcacttttcttgaacgttccttccagtaccaatgccgtacgggtggcctcttcgttggggagtatatagaaccagtagtcggttttatgctcgatacctacgcttaccgggggagtgaccgaatttgccagataagctacagttccgctggagccggtgtagtttccggtcagataatccggtgtgctcattttggtggtgctgtatcctcccgtgcccggtacagcttctttcacggcattccgcacaaagatgtttttcagttcgtaggatgccgccgagtactgtccgttggggtcaaattcggttctgatgccgcttacggacactcttgcaacgagcctgctcagccgggctgtcataccggtgttgatgcctgcgcccagtgtgaaggtggcgttgccatcaccgttttttacgtctccgctcatgggcagacaatccttggtctgggcatcacccagttcaattgttctcttcaggaagtcggtcttgttcaggacgcctgaaaaataaccgtctgtaggggcgttggctaccacgatgcccgtacagttcgttgccggagtacagttgatggttattgccggagtggtgttattggttacggtccgtatggcattcaccgattcgtcactgttgaagatggcgacggtgaaacgcttcaccgtattctcttcgttttgtgtaggcaatgcgcttccggttgccttggtgctcactccgcttcccgtcaggcgcagttcgagttgtgccgtctttccctgcggcatgggttccgttattccgttttcttcactgccgcatccggctagtgtaaaggttgctgctgccagcatgctccataaatagctgtttgttttcatgtatgcctgttttataggttaatatacttttggtgttcccggtcattttgctttcctatttgtttttcaactctttcagcaccctgtctgcctgctctatgccggctgccgctgccatggtaagatatacttccgccttgtcccgttttccttcctgtaggcagagtatgcccatgttgttgtatgcgattggcatggttgcgaatctctccagatagcgccgtgctttggccgtttcccctttggtgagtgccacggccgctgcattgatattggcttcggggctgtcgggaaacaggcgggctgtgaggtcgagtacatcgttgtattccgtagatcctttcgggtaactgcccgctactgcaaagagctcgttcaggcgcagtgtctgacgttctcccgtacgggacatcttcaggctctccgccgcatccggctgctggcgggtgtactctatcctgtagtcgacccgcataacttcgggaaatatcttttccgccaggtatctgtagggctttccgtcggcaagtttcatcagcattcgttcccgccctttatccatgtctacactccctatcaggtctagggcggcctccctgaacatcatgccgctttgtcttgtcagtgcggcaatggagtcccagtcttccggaatccaggttacttccagcggaatgccagttgcaagtcggttttcccgcaggtatgctttaaggttcagtgagcgtgccagtgcattcatttcgttctttttcaggtttccggcaggtgccccgtatcctgtaaccttcactttcaggagttccgttccctcttcccgtcggatgttctgcaaagcattgcgcagccggtggtatatttctaagttctgtttgctttcggacaattctcccagcgttttctctcctttttcctgcttccctttgccaaagtaggggatggaccccgtcactgcatgcagtgtgtctttgccgggtgcaggctcgatgaagttcacccaggccaggtatttcctgtccgtatccatgtcccaggctgaagtgcggttttcgggcaggttcagcctgccggcaatcctgtcttcgtaggccttgccctgtttgccgtggcaggcgcattccttcgttctcatcaggagccgggcgtccttcatccattccttatagggcactgccacccggtatcggaaggagcgcgccatcctggcgtcgttccttatcactactgcgggtatgggggccggatgcccgtttccggcaaattccttttgccgctggtacactttctgcttttccttgccgttgatgagtaccgccggcagggcttgctcgttttccccgctgatgagtacgggcgtcagggtcagcgattcgtccgagggcattctcagtccttcgaaatcgactgagaggtcaatgttcagacgcccgtccgcaagcgagaactgctgtccggtgacgaacatttccccccggtagaattcctgtgcatgacctgcccggcagcagagcgccgatagtgccattatcataggaatacggattaagtttttcatactttcaatttgctgttgtaatttatcttgttattattgcatcatatacactaaggatatggaggctttggtgggagcgatgaaattcctgtttccgcttcctgtcttttctccgcagtgcgcgcagcggtagcgttcgtatcgggtgtgcaggaatcctacgccgatgcttgtctccagtccccagcggggggagaggatgaagtgatagccgtatgatattcccactcccgtaaagtctccctcgtatctttcggaacgtacccctttgaacagcccgaaaggcagccttgccttggctacgttgtacacgccgtacatcaggcctgtcccgaagaaatgtcctccgtagggctggcacatccagtagcgcagctccggctgcacgaaccagtgtttccagcgtttgtctcctcctgccggaaaggggttgtaataaaccccggcctccagcgtgaaacgttccgacagctttagttccacaccgaggttgggcgaggcgagcatgccccccgtaagcaggtcgcttttcacggcaacggtttgcgcccctgccttgcctgcacacgacagcagggcaaggagcatcagcatcggtatgtattttctgcttctcaatttctttgttcctgttataaatctgtcagtgtaatctccttcaggtatatcctggttatctggtttactattccgagtttttgtgcggctcttccgtattgtgcatagaaccgctcggtaatggggctgttgcagttcagatgtcctcccgtggcttcgagaatatccagcagggatatttccatggctcttttagcaggaatataggactgtatttccagcggatgttccttttctttcaggatgataagtccggcattggtgagctgtgtcagcaatacccgcatctgcccttctgtaagtgtgcactgctttatgcaagtaccgtagtctcttgcatagatgcatttgagtactgcaatggcagtctgtgttttgggcgttatcatgtagttttcttgtttgtttgattgttggtatccggccgttactttgtaggtaacggaagattgccctcagataccctgcagaagcgtctgccgcatatgcatccgggttgtataaccgataaagttatataacagacgttttcccgctttcctaccggaaggcggcaaggggggctttgctttattggttgaagtcggtttgttctgttttgtctgctgccggtcttttatgccgtatatgataagattttatcttttttattttgtttttcaagttttatagttacttttgcggtaggaatatcctccgttacctacaaagtaatccctttgtaataatctgtatcatagttatatacatggaatgctcccttgtcatccttgtcggatactgcatttcttcacgtaagcgataatttttttattggtcctgtccagcatttcgttttcgaagggtttcagataggtttccgtaacctttaccgatgaatgccccagtgcgttgcttattactcccacggcgactctggtgtggaacgccgttgttgcccatgtgtgccttgcagtgtaggacgacagctttctgcccagtctgagggctgccgccagcagtttgagtttccggttgaatctccgcaggacctgttggtaatgtcggtattcttcacgccttcccagggggaaacggcagttttcgtcccccagtatgttgagcaggtagggcgagtccgtgcggcggtcggcgcatcggcggataagctcagcggcttcttcggttacgtgtacacgtatctgccttcccgttttctgtcttcggtaggtaattaccccgtccttgaaatcgcatttacgcagccttgcgaggtctgcaaacggcattccccgcaagaggaagagcagtgcgaaccatatctgcgcttctttgagttcccggtgcaaggaagcggagatgtcgagtgcttgtcccatttcggcaggtgggagtgcgcgtttcacgtcggcacgggttccggtatatacatgtttgaacagtccgggcacatagtcggtgaggcctgccagcagcgcgcggttgtatactgcccgcaacatgcgcaggtaggtggacatggtgttcagcttgagcatcctctccagcaggtgcctttcgaatttgtgtatcgtggcgatatcaaacgctttccgcatgcgtatttcgttttttggatgttcgctttcccagtaccgttggaaagcccgtagcatgctgcggtatacatgggcggttccgaaccgcccctcgtcttccagttcctgtatgactgaaagcgtaaaggttgttaaatctttcataatctgttggctttataatatttacagtctttgcgtgcgccattgctgcacgcgatataatatattgcattttattggaatttgtttgcttgcggacaatgttccggcttcgcagaggctttacatcctctctttgcaggtacggacacaccaagcgtatcgctacattggttccttccttgaagaaccgtttttatgggtgcacgccgagacgtcaggagcgttgttcatgccaaaagtagtttaagatagtgtataggaagtaaacgcatggtctgtcggagtgaaacagatggtctgtacggtacaaacagatggtctgtttacaccatacagaccatctgttttaaaagaaagcatgcactcattcttccctttcccgtttggattgtgcttccgggcgggatttcttttgagggatactgtccggagcggacgtattcttctccgcttgttttcttttcagccttttcaacttccacttgttccaaaagagcagttcattccatttgttgaaatccttcttgaagatgatgcctataccctgagtggtgaggttggtcttggtgtaatagcggtcgttggtttcgttataagctttcagacggatatcgccggaacggtttacgagccattcggcttggaagtcacctacgaagttggtgttcgccatcggattctcgcgatagccgaagttaccgtttatgagcaggcggttattcagcagttgcccggaaagcattgtctcgaactccatgtccgtccagcctttttctccggtactgaagtttgtgccgaagttccagttattgctgtcgataatctgcgagagtgcattgttcagttgtccggaaagggtagaagagagcacgctcgacatcatgttggagttgccggtggcgtctacattctccggagtatagaacttgccgatacctaaaaggtagagtatctgcatgttcatctgctcgtccgtagggatataattccgtaccaacgcctgtacttcgtcgcgttcgttgggcagctccaggctcattttgatgtccggtgaggtgagctgtccggtcagcgccatgaggcagttaaccttgatgttggtctggttgacgtaattgccggcatcgggaacgaggtcgttcagcgaagcggagtttacaagatagcctgcctggatgtcgagggtggcattgagcggcgcgccgttaaaggtgatggtacttccgtctttgatgatgaagtccttgcggataacttcctgcaggctgaatttataaactccctggctgatgcggtaactaccgaacattttcacatctcctttattgtagaattcggtgcggatattccccgttcctttaccgctgatgtagtcacctgcaatggggtccatgatgattttcatggtggcgtccggagttgcgtctatcaggagattcagtcgtatgtcggtgtcactttccttttccatgacttctttctgcgcctgctcgtattcggacatcagcatgatggaatcctgaagtacgcggcgcggtgtcttgtctacgaagcgtatgaactggttgctcactgccgaggcgacaccttctttcatataagtgaagttggtgttgcggttggtggtcattgccacgtcgatattcaccccgtctgccgcattgccggcaatggtggcgttgcctgtgccatacaccgtgccgtagaaggggaagtcgggtgattctttggtgttcataaccagcatattgtccacatcgaaccggaagcggtattccaaatccttgaaatgccggtagtgcaggtaaccgttggctctgccctgatgcccttgcgtatcgaagatgcggttgttgcggaaagtaagtccgcccggttcgataagtatgctgtctttcagggagaaagtagtgttgagtacatctaccttgagggaggcgtcaccgaatacgcgaccttccattgtcagcgccttgaacttgccgtagaaatgtacgtggccgctggaacgcccgttgaattcgggggtgatgctctgcatgtagtggtggatgaacttcaggttggtgctgtcggcttcgatttgcaagtcgagcgcactggtgggttttatggggtagatgtatccgtatacatggcttttggcaatgtctttctcgcggatacgggcatccaggtagatgcctttcacgtcgtgatgccattcgccgtgtatgttggcatcgcctaaaagaccctcgttcaagccgaggttgcgtatgaagaggtcggtactcattaccggctttttaagtattccgctggcatatgccgggccagtggcctcacctttgaagttgacacccaggtcggctatatcgaatacgtatcctatgtttatctctttcaggttcaggcgtacggtgtcctgaggttgttcggatacggttccgttgatttgcaagtgacgctctttatggctgaagtagaaattgttgacgtgcactttgcccgagtcgaccacgatttgcgaagggtgtatcttccatacggtgtcgttgaggattacgttcgtttcctgtacgttgacaatcgttttcagggcgggtttctctttttgggcttggcgggaggattttgtgtgtattttgtcgttgccagcttcttgggaagagttgcggacgaattgagtgagagccgctatcttgccgctgtaagttacagcgctgctgtttccccagttgaatatggtttgtatccggtcgtcctttgccttggcttcgagggctacgtttaccgcaccggttgttttccggttggtgaagcggacttttgcctggaactgttcacccggattttcgcagagaaccacacccgactcaaagaactttccgccgtaactcagccgtggaaagtacccctctacgcgcaaccgttgcgctttgtcgttgaaatagcccttcagagtagagtgggtatatactttcagcggtatctggaatacggtggagagtatctctgtatcgtagatatggaggtcgaaatggaaattgttttctgttttctgcggttttctggcgggctgtatcagagccggaatgtaacgccgcatgatgttgagcacgctggcgggtaatgtctgataggaatagtcgccttcgatagtaccgcgcaggaagttggaactgatagtcagccgtttctggcgctcatcgctctgagtggcagaaatccgcaggttgtccatgaagaagttctgttccggagcgatgtattggagactgtcgacgttgatttcaccgttcatgtcgttgatggagctaccggtgaagtcggcttttatttttacggccaattccgtgtccttgtatttgggtgtgaggtgcagggtgttagggcggaaatggtcgatagcggcacggaagttgaaggtgggtgtcttgccggcagtattgatagagccgttcagttgtatggctccgttttcgtcgttgagcgatacgttaccgttgaagccgccttgcttatactctccgtccaaagtgatgttttcgtaagtatagtcactgtagtctatggatgccaccagccctttcatggtaatggcggggtatctttgggcataatgattgcctttgacgtccatgttgaaggtgacttttccaagcttgtcgttgttcagcatcctgcccagttcgaatccggttgtctttaccgcacccgaataagcgaaatagcctttgtctttgtcggaactgagtttgacatctgtcttgatggtgcctatatccgtgcggacttcgccataggtcaccaggtccgtgaagtatccggaaatctctccacggaaagataccgtgcccagattctgcaataccggaggaactcctttgtaatctttactcaggttgcgtacaaagaatgcaatgccgtccgggtcggcatataaattggacagattgccgaatatgtatgcatcttgcggatgagacagatcctgcagggatacattgcctttcagcaggaagtgatcgttggaagagataagcagtttcgggcagttgagccggttgaccgttccggcggcttccatttccaacttcaacttttccttgaagggcttgaaggcaggcacgaatgccgatatatcctgtaatgctacttccgaaggcagcatacggaacgagaaacggacatcatcggtgaaatggccgagtgattccaggctgtcgtattccatacggatggtatccattgccaaagaggtgttgggcaaatctatggcgaagttctctatccgcatcttccggtcgttggctattatcttcagacttagctttttcagttcgaagccggagtgctcctcttcaacgctcatccgcttgatggcagcgttgaccgagtcgttctggagcgctttcagcgagatgttggcaagaatgttggacaggcggatgtgttgcgggttgaacttgcccggagtgctttcggctgacaacacatcgtaagatacctttccgcgtcgtatcaggagtgagttgatgcgcaggtccagattgctcttcttcttgacggtgtctttggaagcgaaagcatcgagcacgaattggaagttggtgcttgcctggggagtaggtctttccagattggcattgaaactgaaaagctgtacgttaccgatggatatctttccgctgaacagcggcagtatctcgaacttagcggacagacggcctattttcagcaactcttttcccgattggtcgttcagcaccaggtcgtcgatgataatccggttcagcagtcctatgtttatccgccctactgtgagctcgctacctaatacggtgctcagccccttggcaacgagtacagacatgcggtgctggacataaggaatgttcagcagcaaaattattccgatatagagtcctaacactataccgattatccagcgtactgtcgttttcagcgttctgataggcggttatttttttaattcagccaacaaaaatatgaaataatacgttatggatactacttttatcactacttttgtagcgtttaaacgtaaataaacactatgagtacaataatcttaggaattgaatcttcatgtgatgacacttccgcagcggttatcaaggatggctacctgctgtcgaatgtcgttgccagtcaggctgttcacgaagcttatggtggggtagtgcccgaactggcttcgcgtgcgcatcaacagaatatagtgccggtggtgcacgaggctttgaaacgtgccggagttaccaaggaagaattaagtgccgtggcgtttacgcgcggtccggggctgatggggtctttgctggtgggtgtgtcctttgccaaagggttcgcccgtgcgttggggatacctatgatagatgtcaatcacttgaccggacatgtattagctcattttattaaagcggaaggtgaagaaaacgtgcagccggaatttcctttcctttgcctgctggtttccggtggtaactctcagattattttagtaaaggcctacaacgacatggaaatcctggggcagacaattgatgatgctgcaggtgaagccatcgacaaatgctccaaagttatggggctgggctatcccggcggaccgattatcgaccggcttgcccgccagggaaatcctaaagcctttactttcagcaaaccgcatattcccggactggattacagcttcagcggcttgaagacttcgtttctgtattccttgcgcgactggataaaggatgaccccgatttcatcgaacatcacaagacagacctggcagcgtcgctggaagctactgttgtcgatattctgatggataagttgcgtaaagcggcaaaacagtacaagataaaggatgtggccgttgcaggtggtgtatcggcaaacaatggtctgcgaaattcattccgcgaacatgctgagaagtatggatggaatattttcattcccaagttcagctatacaacggataatgctgcgatgattgccataaccggatacttcaagtatttggataaggatttctgtccgatggaagcgccggcttattcacgtgtcactttataaggaaaaagtatattgcatatatataataaggtatgaagacggaagagaaggtaggggaactgctgaaagcaaagaatttctccctttccaccgctgaaagttgtaccggtggtggaatagctgccttgataacttcggttccggggagctcggagtattttaaaggcggaattgtggcgtattccaacgaaataaaggcggatttgctccatgtttctgtcgagacgctggcgcagtacggtgcagtgagcagggagacggttgttgaaatggtgaaaggtgcgatgaaaacgttgaaaacggattgcgcggttgccacttcgggaattgccggtcccggtggcggtacaccggagaaaccggtaggtactgtgtggatagcggctgcctgcaaaaacgaaattgtaaccatgaagcaggaaggtgatcgcggaagagtgaaaaatgtacagtcggctattcaaaatgcgctgtttatgctctgtagtatgctgaaatgaggaaaaaatgttttcgtacaacgaattattttaggaaaaacttgtttcgtaacgataaaagtgcttactttgcgctctgtttgaaataagtatagataaaaactataaaataaagatagaaatgtcgaagatttgtcaaattaccggaaagaaagccatgattggcaacaatgtttcacactcaaagagaagaacaaaaagaacctttgatttgaacttgtttaacaagaaattctattatgtagaacaggactgctggatcagtctgagcatttgcgccaacggtctgcgcattattaacaaaaaaggtttggatgctgctttgaaggatgcagtagctaagggttattgtgattggaaaagcattaaagtaattggctaaaagtagaggagaataactgattatggcaaagaaagcaaaaggtaacagagtacaggtgattctggaatgcacagaacacaaggatagcggtatgccgggaacttctcgttatattacaacgaagaacagaaagaacactaccgagagattggagttgaagaaatacaacccgattctgaagagagtaacagtacacaaggaaattaaataataatagtataacccatggcaaagaaaacagtagcaagtttgcacgatggttctaaggaaggtcgtgcttatacgaaggttatcaagatggttaagtctccgaagaccggtgcttacatcttcgatgagcaaatggttcctaacgaaaaagtacaggactttttcaagaaataagataaatgcagttgctgcaaggcactgattacttataaagctcctctcgccgatatatcggcggggggattttttttgctattaaatcgtttcggcttttattatttgttaattttgttatatctttgtggcataatgtattgtacaaaaaaatagactatgggattttttagttttttctcaaaagaaaagaaggaaacattagataaaggattatctaaaacaaaggagagtgtgttcgggaagattgcccgtgctatagccggtaaatcgaaagtggatgatgaggtgctggataatctggaagaggtgttgattacttcggatgtgggcgtagaaactacgttgaagattatagaacgtatcgagaagcgtgctgcagacgagaaatatatgaatgcgaaggagctgaatgtgattctgcgcgatgaaatcgctgctttgctcacagagaacaactcggatgatgtggacgactttgaaactcctgttgcgaagaagccatacgtgattatggtagtgggagtgaatggtgtaggaaaaaccacgactataggcaaactggcttatcagtttaagaaagccggcaaatccgtttatctgggtgctgccgatactttccgtgcggcggcggtggagcagctggttatctggggcgaacgtgtgggagttcccgttatcaagcagaaaatgggtgctgaccctgcttctgtggcatttgatactttgagctcagcagtagccaataatgccgatgtggtgattatagataccgccggacgtctgcataataaagtgggtctgatgaacgagctgaccaaaattaagaatgtaatgaagaaggttgtgccggatgctccgaatgaggtactgcttgttttggacggttccaccggacagaacgcatttgagcaggccaagcagtttactttggcaacggaggttacggcaatggctgtaaccaagctggacggcacggctaaaggcggtgttgtaatcggaatctctgaccagtttaagattccggtaaagtacatcggtctgggagaaggtatagaggacttgcaggtgttccgtaaaaaagagtttgtcgattcattgttcggagggaatgcatgaaacggaaaaccattgatatcataacattaggctgctctaaaaatttagtggactcggagcatttgatgcgccaactggaggaagcgggttttcatgtgacgcatgatgccgagcgtccgaaaggagagattgccgtaattaatacctgcggtttcatcggcgatgcaaaagaggagtccatcaatatgattcttgaatttgcgcaggccaaggaagaaggcgaactggagaaactctatgttatgggttgcctttcggaacgttatctgaaggaactggcaattgaaattcctcaggtggataaattttatggtaagttcaattggaaagagttgctgcaggacttgggtaaggcataccatgatgaactgcatatagagcgtacactgaccactccccagcattatgcttatctgaaaatatcggaaggatgcgaccgcaaatgttcttattgtgccatccctattattacgggtcggcatgtgtcgcgtcctatggaagaaattctggacgaggtgaagtatcttgtggcccgcggagtgaaagagtttcaggttattgcgcaggaattgacctattatggtgtagatttatataagaggcagatgttgccccaattaattgaaaaaatctcagaaattccaggtgtggaatggatacgtttgcattatgcttatccggctcatttcccgatggatttattccgcgtgatgcgcgagcgtcccaatgtatgtaaatatatggatattgccttgcagcatatcagtgataatatgctggaaaaaatgcgccgtcatgttaccaaagaggatacttatcggctgatagaaaagttccgggaagaagtgccgggaattcatttgcgtactacgcttatggtggggcatccaggagaaacggaagctgactttgaagagttgaaggagtttgtccgcaaggtgcgcttcgatagaatgggggcatttgcgtattccgaggaggaaggtacgtatgccgctgcccattacgaagacagtattcctcaagaagtaaagcaagcccggttggatgaattgatgtccatccagcaaggtatttccgccgaactgagcgcggcaaagataggcaggcagatgaaagtgataatcgaccgtttggaaggtgattactatatcggacgtacggagttcgattctcccgaagtagacccggaagtgctgattgaatgtggtgatgaatcgttggaaattggcggcttttatcaggtagagataataaattccgatgatttcgacctttttggacggattatttaaatatttcctttcgtacttgttgtgtatgtggggaagatttgctaatatagcacagtagttcacaattttaaagcttggattttgaataacaaagaatttacttcggaattgtcacgcaggttagggtatactttgaaggatacttcggagttggttacttctttactgtcggatatgacgcggcaactggaagaagggaatatgatttccatacaaggttttggaacattcgaagtgaaaaagaaagcggaacgtatatccgtaaatccaacaaccaaacagcgtatgctggttccgcctaaactggtgttaacttataaacccagtactttgctaaaggataagtttaagtaatctttcttttaaaatcttccatattatgaatgaaaaactaaacatacaggatctgattgacttgctggctgaaaagcatggcatgagcaagaagaatgccgatagttttgtgaaagagtttttccaactgattgaagaagcgttggaaaaagacaagtatgtgaagattaaaggcttgggcgcttttaaactgattgatgtggaaagccgggagagtgtaaatgtcaatactggggaacgctttgagatacagggccataccaaagtctcatttactccggagcctgctctgaaagatattatcaataagccgtttgcacattttgaaacagtagtgctcaatgaaggtactgttttagaagatacccctgtagatagtggcagtgaggaagatgaagatacggagcagaaagtggaagatgttgtgccggaagtggttgccggtagtgcggttgagacaccggagattgcggagaaaatcgatagtcctgtcgaaccggaacctgtagaagaagccgttgttcctgtggagactgtggcttcggaggaagttaatgaagagagggtggaggttatcaaaactgccggcccggctgaatcttccgcaatgaaatacttcattgccatcgtggctcttgtggtattgctatgtgcaggaaccgtcgcttatttgtattatcctgattggtttgacggattatcggctgaatcacctgtggaggaaaccgctgacaatgaagctggcaatgcggcaggtaatacggtcttgatggatagtgtcggtgttaaggacagtgtggtgattgccgtaaaagatactgtgtcgaagaagctgattgctgagcctgtaataaaacagcaggaagcaccggttgccgtcagacagcctgtggtggcagccgctacatctgcttcccagccgaaaaaagagaagaaagttgagtatgtacccgattctaccaattataccattgcaggaacgcaggcgacatacacgataaagccgggtgagacattgaccagagtggctcttcgtttttatggaactaaagcgttatatccatatatagtaaagcataatccggacgttatcaaaaaaccggataatgtacctgcgggcacaacaataaagatacctaaattagtgaagaagcagtaaaaagatactgcttcttttttgttaaatactcagagcttgtttaaatattcttgaagaagtattttcttcaagaatatttgagtttcttcctggtctgttttcctctttttatccgttacatagcctgctatgctcttagtaaaaacagaaaaatattttcaaagaagaactcttgaaaagaatgctgaacaaaattaaacaggctctaaactctatgaaagtagtttaatctaaaggtttcacattgttttttaataaaaattagttgctatggttaatttattcccgtacttttggaaacgaattataattaccggtgtatggccgggcgaaaacgaaaaattaaacattaaaatacattgatttatggctgaaacaattgatatccgcgaattgaacgagcggattgaaagacaaagtgctttcgttaccaatcttactacgggcatggaccaggttattgtaggacaaaagcacctggtagagtcgttgttaatcggtttgttgtctgacggacatgtgttgttggaaggtgtgcccggtttggcaaaaacattggctatcaaaacactggcttcattgattgatgcacaatatagccgtattcagtttacacctgacttgttgccggcggacgttatcggtacgatggtttacagccagaaagatgaagcttttcaggtaaagaaaggacctgtatttgccaattttgtattggccgatgaaattaaccgtgctccggccaaggtgcaaagtgctttattggaagctatgcaggaacgccaggttaccataggtaaggaaacattcagactgcctgaaccttttttggtgcttgcaactcagaatcctatcgaacaagagggtacgtatccgttacctgaagcgcaggtagaccgtttcatgctgaaggtagttatcgactatcctaaactggaagaagaaaaattaattatacgccagaatataaacggagaaagactgaatgtaaagcctattctgaaagcagacgagattatcgaagcgcgtaaggtcgtacgtcaggtatatctggatgaaaagattgaaaaatatattgtcgatattgtatttgcaacccgttatccggagaagtatgatttgaaagaactgaaagatatgatcggattcggcggttcccctcgtgcatctatcaatctggcattggcggcacgcagttatgctttcatcaaacgccgtggctatgttatcccggaagatgtgcgcgccgtggcacatgatgtattgcgccaccgcatcggtctgacttatgaagctgaagcaagtaatatgacttcggatgaaatcgtcagcaaaatattgaataaggttgaagtgccctaatgtaaacaatttgtttactatttatgtattactgaatggaaacaactgatttattaaaaaaagtccgtcagattgagataaagacgcgcggattgtccaataatatttttgcgggccagtatcattcggctttcaaaggtagaggtatggctttttccgaagtgcgtgaatatcagtttggtgacgatatacgcgacatagactggaatgtaacggctcgttttcataaaccctttgtgaaggtgtttgaagaagaacgtgaactgactgtaatgttgctggtagatgtttccggtagtctggagttcggtactgtgaagcagatgaagaaagatatggtgacggaaatagctgctacattggctttttccgccattcagaataatgataaaatcggtgtcatcttcttttcagaccggatagaaaagtttattccacccaagaagggacgtaaacatatactatatatcattcgcgaattgcttgatttccgtccggaaagtcgccggaccaatatccgtctcggcttggagtatcttacgaatgttatgaagcgtcgttgtacggcttttgtcttatcggacttcatcgaccaggagagttttaaaaatgccatgactattgccaatcggaagcatgatgttgtggctattcaggtatacgaccgccgtgtagaggagttgcctgctgtggggctgatgaaaataaaagatgcggaaacgggtcacgaacaatggattgatacttcttcgcgtgccgtacggcgtgctcatcgtgattggtgggtgaataagcagacggaactgaatgatacatttactaagagcaatgtagataatgtgtcagtacggacggaccaggattatgtgaaagcattgatgaatttatttgcgaaaagaaactaatcggagaatgaaaagatatttatttctgataacgctgttgacagcattgacgggtaggataatagcccagtcggtgacagtggatgctacaattgattccttgcaaatccttatcggggagcaggccaagattaagcttcaggtttcattggacactgataagcgtgctattcttcctgcctatactgatactttggtgcgtggagtggaaattgttgatatagccaagcccgatacacagatgctgaatgacggcaggcgctcgttgataactcaggagtacaccgtaacttcctttgactcggcattatattatttgcccccaatggaggtgcttgttgataataaggcatatcgctccaaagctttggcattgaaagtgtattccatgccggtagatacgttgcatcccgatcagttttttggtcctaaacccgtaatgaaagcaccttttgcatgggaagactggtatatgtctatcgcttgtgctgtattgtttgtgccattcctgttgctgcttatctatcttgtgaaacgtattcgcgataacaaaccgataattcgcaaggtgaaggtagaaccgaaactgccgccgcatcagttggctatgcaggaaatagaacgcatcaaaggtgagaaagtatggcagaaaggacaatcgaaggagtattatacagaattgacagatgctattcgtacttatataaaagaccgtttcggtttcaatgcattggaaatgacttcctctgaaatcattgataaactattggaaatgaatgataaaaatgcaatatcggatttgcgtatcctgttccaaaccgcggatttagtgaagtttgccaaacataatccactgatgaatgagaatgatgcaaatttgattaatgcgattgactttatcaatgaaacaaaggaaaaagaagatgaaaatgccaagccgcagcctactgaaattactatcattgaaaaacgttccttgcgtaccaagatactgcttggggcaggtatcgttgctttaacggcagcacttgccggttcactgatatatataggtttggagctgtataactattttgcctgagagtaaaagcagggagatacgcttcaatcataaatcataatttgtaaaattgtaaatatcatggtttttgccaatattgaatatttatttttgctgctgttgcttataccttatatagtatggtatatcatgaggcggaagaatagtgaagccacgcttcaaatttcagacgctcgtgtatatgcgcatgctcctaagagctataagaattacttgctgcatgcaccatttgcattgaggataatagctttagctttgattattctcgttttagccaggccgcaaactactgatagctggcagaatagtgaaatagagggtattgatataatgcttgccatagacgtttccaccagtatgttggctgaagatttgaagccgaatcgcctggaagcggccaaggatgtggcggcagagtttatcaatggccgtccgaatgacaatgtcggcatcacgctattcgccggagaaagttttacgcaatgtccgttgacggtagatcatgccgtgcttttaaatttgataaaggacgtaaaatgtggtcttattgaggatggtacggcagtgggtatgggtattgccaatgcggttacccggctgaaagacagcaaagccaaatcgaaagtgattattcttttaacagacggcacgaataatagaggagatatttctccgttgacggctgccgagatagctaaaagtttcggtatccgtgtttatactatcggtgtaggtactaacggtatggctccatatccttatccggtaggtggaactgtgcagtatgtcaatatgccggttgagattgacgaaaagaccctgacacaaattgccggaacaacggatggtaattattttcgcgctacgagcaattcgaagttgaaagaggtatacgaggaaatagataagctggagaaaacgaaactgaacgtaaaagaatacagcaagcgccaggaagagtatcgctggtttgctctggcagctttcttatgtgtgctgttggaagttctgttacgtaattcaatattgaagaagataccgtagtatacgcatcctttttctcaggatattgtatcttgtacaagtttagtaaatagtaaatcgtaaaaataataaataaagaaatgtttcgatttgaagaacctgcatatttgtacttgttgctgttgttgcccttgttagcagccttctacttgtattccaattatcggagacggaagaatatccgcaaattcggtgatccggaactgatggcacagttgatgccggacgtatccaaatatcgtccggatgtgaagttttggatggtatttgttgttatcggtctgttttctgtattgttggcgcgtccgcagtttggttctaaactggaaacagtgaagcgtcagggagttgaagtgatgattgcattggatatttccaattcgatgctggcacaagacgtacagcccagtcgtttgcagaaggcaaagagacttgtagcgcagttggtggataaaatggagaatgataaagtaggtatgattgtttttgcgggtgatgcatttacacagcttcctattacaagcgattatatatcagccaagatgtttttggaatctatagatccttcattgatttccaaacaaggtacagcaattggggcagccattaatttggcctcccgtagttttactccgcaagagggggtagggcgtgcagtgattgtcattactgatggtgaaaatcatgaaggtggtgcagtggaagctgctaaagatgccgcagaaaaaggtattcaggtgaatgttcttggcgtaggtatgcctgagggagctcccatcccggcagaagggacaaatgattatcgtcgcgaccgtgacgggaacgtgattgtaacccgtttgaacgaacagatgtgccaggagatagctaaggcgggcaatggtatctatgtgcgtgtagataatacaaatggcgctcaaaaggcgattagccgggaaattaataaaatggcgaaagctgatgtggaaacacaggtatacacagagtttaatgagcagttccaggctgtggcatggattattctgttgcttttgttggcagaaatgctggtattggagcgcaagaaccctctgttccgtaatattcatttgttttccaataagaaatgatgcgtatgttacagaaaaaatatataagcttttttttattgctgctaatggcagctacagcttcggctcagaaagccgaacgtgattttatccgtaaagggaaccgtttttttaaagatagcgtgtatgtggatgcggaggtaaattatcgtaaagctttggagacgaatcctcagtctacagtctcaatgtttaatttggggaatacattggctcagcagaataaactgcaagaggctatggaacaatatgttgccgctacaaaaatagaaaaggacaagaatgatttagcgcaaatctatcataatatgggggtgatttttcaatcacagaaagattatggcaaagcggtagaagcatataagcagtcattacgtaataacccgaaagatgatgaaacacgttataatttggctttggcgcaaaagatgctgaaagaccagcagcagaatcagcaaaaccaggaccagaataaacagcagcaacaggaccagcaggaggataaaaaggaccaaaataaagatcaacagcagaataaagaccaacaacaaccgccgcaaccacagaaaaaggacagtgagatgtctaaagagaatgctgaacagcttttaaattctgtgatgcaagatgaaaaagatgtgcaggataaagtaaagaaacagcaggttattcaaggtggtcgtttggaaaaagattggtaataaatataacaggaagtaatatatgagaaaaataattgtcttatggatggtgctgatgatagtcagtttgcgtgcttttgcagatagcaaggtttcgtttactgcatctgcacctgatgttgtggcagtaggtgatcaattcaggctgtcatatacagtgaccacacagaaagtgagagatttccgggctccttctataaaaggttttgatgtactgatgggtcccagtcgttcacaacaaaagaatgtgcaagttatcaatgggcagacaacctctacaagtagcataacatttacttatatattgatggctacggctgaaggtagttttactatacccggggctactataacggcagagggcaatcagatggtttccaattctgtgcacgtaaaagttcttcctgctgatagaacaaatggaggggcttccggaaatagtggaagacaaagtggttctgcaagccgtgcttcatcaggaacatcagtatcgaataacgatttgtttattacagctactgccaataagacgaacctgtatgagcaagaggctctcttgttaacatataagatatatactttagtagatttgagaggttttgacaacgtgaaacttcccgattttaaagggtttcattctcaggaagtcgaattgcctaatgaccgtaaatggagtcttgaacactataaaggaagaaactatcagacgaccgtataccgccaatttgtattatttccgcaacaaccgggaaaaataacgattgatgcggcacgttttgatgcatctatagccaaggttactcatgtggacgatcctttcgaagctttcttcaatggaggttctaattacgtagaagtgaagaagacattaatgacccctaaattggttgttgatgtaaaagctttaccggatggtaagccttcgggattttccggaggagtgggagaattcagtatttcttcttctataaatagtacgaatgttaagacaaacgatgctgttactgtgaggcttgttatttcgggtacgggtaatctgaaattaatctctactccggaagttaaattcccagaagactttgaagtctatgacccgaaggttgataataagttccgtttgacaaatgccggactctccggcagtcaagtgattgagtatcttgccattccccgtaatgcgggaacatataagattcctgctgtaaagttcagctatttcgatattaaatctcgtacatacaagactttaacgaccgaggaatacgaactccatgtagaaaagggaagtggtaatgcagctcagactattgccaattttactaataaagaagatttgaaagttttgaatgaggacatacgttatatcaagcagaataacgtaactctttcccaaaaaggagatttcttcttcggttctttggcttattggctgttttacatagtgcccggcattgcattcgtcctgttcttcattgtttatcgtaaacagattgcagccaatgccaatgttgctaaaatgcgtacgaagaaagcaaataaggttgctgtgaaacgtatgaagttagcggggaaattgttggcagataacaagaaagatgcattttacgatgaagtattgaaagcattgtggggatatattagcgataaattgagtattccggtttcacgtttatctaaagataatgtcgagggagagcttcgcaattacggtgttgatgatgcactgataaaagatttccttgatgcattgaacaattgtgagtttgcccgttttgctcccggagatgataatcaggctatggataaagtttattcagattctttggaagttatcagtaaaatggaaaactctataaaacattaaattgggaggaggtataatgatgaagaaagtaatatccttagcatttggtctactgataggattagctgtttgggcgcaaggaacggcagatacttcggcttctgccaaagattctgtgtctataggttcgcatacggaattttctgcaactaaatcagctgacaatgttacgaaagcacaaggtgacagtgcatatatgcgtaatgattatgcttctgccattcaaatatatgagagcttattgaaaaaaggtgaagccgctgaagtttattataatttgggtaatagctattataaagcagacgatatagcaaaggcaattttaaattatgaacgcgctttgttattgcaaccgggcaatgcagatattcgcgctaatttggaaatagcacgttccaagacgatagataaggtagtttctgtacctgatatattttttgtagcttggattaagtcattgacaaattgtttaagtgtagatgcttgggctaaattaggtattgtgttttttattcttttgcttatctcgttttccctattctttttttccaaacagattatctggaaaaaaagcgggtttatagcgggaattctatttttggtatttactgtattaagtaatatttttgcttcggagcagaaaagtgaattattggataggaatgatgcaatagtcttgtctcccagtgttacagtacggagtactcctagtgaaagtggtactggtttattcgttctgcatgaagggcataaaattgaaattaaagataattccatgcgcgaatggaaagagattcgcttggaagatggtaaggtagggtggattcctgcttctgcgatagaagtgatttaagagtatccattgctaaatatagaagcccgtatgaaataaaggaaactatttccttttacttcatacgggttctttttgtatttatgagaatgttaaacatataatggaaaaatacagataaatagtttgttttatctttttttttccttaagtttatagcgtgataaagaaataacaaagtattaaccattaaatttatgaatatgagaacgataacatttaatgaactccgtaagattaaagactcattacctagtggtagtatgcatagaatagccgatgaacttggacttaatgttgacactgtaagaaatttctttggcggtcataactttaaggagggtaaaagtgttggaattcacttagaacccggtccggatggcggtttagtaatgattgatgatactaccgttcttgatcgggctttaaaaattttagatgaaatggcaggtgaaactgctgaacctgttcaggcttaagaaaagaaagtaaagaaagatcccaattgctgagaaacaattgggatttcttgtttgttttgtaaataaatataatagacgacttatggaagataaattagtaacattagcgattcttacgtatgctaaggcacaaatactaaagaatgttctcgaaaatgaaggtattgagacttacattcataatgtaaatcaaatacagccggttgtatcttccggtgtgcgtgttcgtataaaagaaagcgacttaccgcatgctttgaaaattacggaaagctcggcatggttgtccgaagaagtagtgggagagaagatgccccaaatagagaaaggcagtaataaggtcttgattcctgtcgatttttcaagttattcattgaaagcatgtgagttcggttttaattttgcaaaaaacatagatgctgaagtagttttgcttcatgtatattttacacctatctatgcgacttcattgccatacggtgatgtttttaactatcagttgagtgatgaagagaatgtccggaatatattgcagaaagtacattcggatttgaatgctttgtccgataaagtaaaagctaaagttacatccggagagtttcctgatataaaatacacttgcgtattgagagaaggcattccagaagaagagatattacgctattctaaagaaaatcgtccgagaattatcatcatgggaacacgtggtaagaatcagaaagatattgatttgattggtagtgtaaccgctgaagttatcgagcgtagtcgcgtaccggttttagccattccggagaatacaccgttcaaagaatttaacgctgtgaaacgtattgcatttattacgaattttgaccagcgcgacttgatagcttttgattcattaatcaatagtttaaagccattttgtttctcagtttctttaatacacttagctgatgtaaaagacacttggaatgagataaagttgggtggcattaaagagtatttccaaaaacagtatccgcaattggaaattcattatgatgtagtgaagaatgatgatttccttaatagcttggatgaatatattaaaactaatcacatagatattattacattgacatcatataagcgaaatatattttctcgtttgtttaatccaggaattgccagaaaaatgattttccattctgatacaccattgctggttatctatgggcggcctaattgaaatgataattttaatctgtctaggtaaggatgtgggctaccgctaaatgctgaattagttttagtggagtccacttattttttatcttttcatggttatactattacatatcccatttcctatgtttatggtgtaatatcaatagaatatttagtatactttcacaaatgtaatattgtatttaacataataatacattataaacgtaaggtcttataagttatccggtaaaaaccgtcataatagaccatgagatgaagaatgggccgaccattcagaagaatgtccgcaccgtcaaactgatataaccgcacaacggataggtgttgtagaaaatcgaatatctccataaggtcatgaaaggggataggacaccattttattgagtaattcataggcctgtcatttttcgtataataggacaagaaagaagacggccgaaatcattaatcggccgccctccgggaaaatgacgtaggtttcacttagaaatccggtcaaacaaaattaaaacagtaataacaagaataataacagtatatagcataatataatattttggtacaaatataacaatatattaccaattatgcaccgtaccattagaacctttaaaaggcatacccatcatttggaaccaattagacgggcgagaacgacgagtaatttcctctaaggtttcctcaataatacgtacacgcttaccataagtctgagaattaaacctatagttatcaccttgtatcatattttcagtttttaaattttccgtacgttgagtagtttccgaagtacgagccattgtttcggctatcttcttaatttcatgttggactttaacgttattcaaataaccagcagaacgcttaaaggcaatatcagcagcagcctgcgcaagctctatcttttgttgctgtggcaagaaatcaagttgcttttgacgcattagattttcagtaacagacaattgcgtacgcgctttgctttcggctatattttggtcatttacagccatttgcgaagtcattaaatttttacgaatatcattaactaactcatccatagccaaacgcgcttctttagttttggcttccgtcttcatttgaagtatctgagccatagcttttccggcaatgtatttaccctcaacacgcaagttatccgcttgtgcttcctttaccttgcggtcaggcatagaagacaacacgtcaatagcacggccaagtccggcagtgataccagaataatcagcagagtaggaggtagcggtaggcggcgtaacaccttgtacagatggagcgccaccggagggggcagcaccagaaggagcagcaccagcagaacccgacattgtagaagcagttccaaaagaactgctgttcaacatcgcgtatggatttaattcagcggcttcaatacgttcacgtagggctgctggcgaattatattcgttcgtcttattccacatatccatctgaaattgttgttgatttttaaccaaatcccaattattttgcttctggtcttcataaagcttccaagcattttgctttgtatcgtcataaaacttccattggtcgccaagttgttgttgatacatttccttattgtacgcaacttgtttatcaaacattttttcattaaatgcattgttcatttgcgcaatctctttatttgcagcattttgcgcggcagttgtaccagcaccgccaataagtgacgcacctgcaccgattgcagaaccaacaacaccagtcattgcagcagctcccataatacaaatatttttaagttaaacatcgggggggatacataaaatataataataaaaaaatcagtagaaagctccgcatcgcttcgctcgctccgcttgctacgctgtgtttgcggcttccgcttcgcacgcaatgcattcggaggcgccatccaagatggcagagcggtgctcgctctcccgagctcgcgaattataaatttttccttatctctcaagatgtgcaaagataaagtagggctaaacacactgctgttaacataacccgcaacgtatgatgagcactttccttcggaaacttgaacgtcgatacgaccaaacggccatgcttcagatacagcctctggacatatttgtaagacttcttttgagttgaggaataataagagatgataatgcgggcggaagtgtacggggccgtattcgccaacggcatagtaacgcactttttctttgggcaaccgtttagtaacatagtaacgaaatctttttaaaaataattgtaaatcagtttttctaaggtaggggatagaaccacatagattgaacttttgttgaagcaattccaattgcgaggactcagactcaaatacaccaagactttcacctgtttcaaagtctaccaaatcataacggcacaacagaccgaaatcagtattatcgcccagatacataggagtggcaacaggcagatagttgggagcgtaggtgagagtaacgaaaacggtatacatagaacaatagctttctaaatcacattggaacgcgtaacgggagtttttagcaagaatgcaagctttacactttccacaaggaacggtcatacactcatgcgtataagggttaactatcctttgagggttgagacacttacaaaaagggttaaatagcgccattacttataatcaacatcaacttttgtactatccacagaggtagcctgcgactgttctgtagattgagaactgttcatattgtttttactgatactcatagacatagtacatgagatacaaagccataaggcggcaatcgctaataccgccttgactataatctcaagagttttgtaaattttctgattgtccataactgaaatatttaaaggttaataatcaaatgtttcatagcttaagaaaatccaaccaaaagcacgggcataagccttaaatacgttagaagcttcaataagtgaacaatccttgaatgttttcacatggaaacggtcttcaaagtccatataatgaacttttatcatacggaactgctttgaatactgctttaaaaaagaatgcgccataacgtttgtaattggttacggcgcaaatgtaaagtaaaaaatgtaaatggtgtaatatcaatattatgtttaatatatataacaccataaactaaaataaacctttatccttctctaatttggaagaaaattataccaaagatagcttacttcaagctatctttggtaatagtagcaattcaattattgcatcaatttttctatttcatcaaattcaggacccatttgtaagttgtaataaactctgtataatccatttagccacaaatctttctgttcaggtttcagttctcttgctttttcataattaggtcttgccttttcatagaaaactttcagtgtagcttggtcttctttgtattttggattattgacatcagtagtagctttttcagagaaatcctgagcttgcaggcaatagattaagcccaagttggaatatgcttctgcataattaggatctactttaatggttttgttgtagaattcaatggctttttcataatctttcatgttatgataaaggtatccttttacgtacaaatagaatgtgttattaggatctttagccaacatatcatctgcaaactgcattgcttcgtcaaacttattattattgctataataatcaatcagatgtccaaagaagaatgaatgttcaggatacttttgaataccatcttttaaggaagcgatccacttgacagtatccccttgagctttcaatgctgtagaaataaattccatggcatatttacccacttctttgtcctcctttgcataaggtgcatatttcaacacgcttggataatcttccattttggctgcagctaagcttgcataataagcaatttggggcaatacagtatctgtttgaagcagattctccttttcaaacataggattgatggcaatgtctacataagttgcgaagaaatccaaagcctctttattcttatctaaattaaagaactggataccaccattaatcaggttgggacgcgcagctaatatagcagcactgttcgatcttctgaacttatttttgattttacctttttcgttaggaatctgtgcaagttcatcgcatttaaagtagtatttgcacatattcagtgcgctgttatacactttaagagtatcataaggctttcttaaataagcattctccatttccttttcattgattctcttttgaataaagccggctacatcccatgtttcggcgttgtctttggtttcagcattgttcagagcttcattgatgagcttctctgcttgtgcaaaatccggttttacgtcgttagcgatgctttttgcctctttcacgctcttttcctgagcgaaggtaaagcctgccgcaagtagtaaaaccattgaaaataatactcttttcatgattgtagaaaattttaaattaatattgtgtctattcttcattttcattgtttactatatcgttctgagttttttctgatgcatcgctatcctcttctgcaatgatatcctcttcggtttctgaggtaactttacatacggagccaatttcatcattacgtttttcaagattaatcagtcgtactccctgcgtagcacgtcccattatacgaacatctgctactttcagacggatggtgatacccgatttattgataatcattaaatcgttctcatctgttacagacttgattgttaccagtttaccggttttatcggtgatattcatagtttttacacctttaccgccacggttcgtcttacgataatcctcaatatcggaacgcttaccgtatccttgttctgacacaaccatgattgtctcagtttcagggtctttgatgcaaatcattccgacaacttcgtcttgtccgtcttcatcgagcgtcatgccgcgtacaccggtagctgtacgtcccattacgcgtacggcactttcgtggaaacggatggcacgtccgttacgattggcaatgataatctcgttgtcaccgttagtcatgcgcacctcgattacgcggtcatcttcgcggattgtaatggcattgacaccattttggcgaggacgggaatattgttcgagcaatgttttcttaatgacgccattctttgtgcagaacagtacataatgactgttaatgaaatcctggtcgttcaggttcttcacgcgcaggtatgcatttacggcgtcatcagagtctatattcaacaggttctgaatggcgcgtcccttagagtttttggttccttcgggtatctcatatactttcagccaatagcacttacctttttgagtgaagaacatcatggtattgtgcattgttgcaggatatatatgttctacaaagtcctcatcgcgtgtctctgttcccttagaacctaccccaccgcggttttgggcacggaattcgcttaacggcgtacgcttgatatatcccatatgagaaatggtaataatcatttcatcgtctgcatagaaatcttccgggttgaattcttccgacgaataaactatttcagagcggcgttcatcaccgtatttagttttaatctcgattaattcatctttgataaccttgcggcagagttcgtcgttaacgaggatttcttccagataagcaatctgcttttggatttcctcatactcggcatggagttggtcctgcatgagtccggttaactggcgcagacgcatttctacgatggcgcgcgattggatttcagtcaattcaaaacgctccatcaaaccgctgattgcgtcattcggagttttggcggcacggatgattttgattacctcgtcaatattgtccgatgcgataatcaaaccttctaagatatgggcacgttctttagctttacgcaaatcgtattgtgtacggcggataactacgtcgtgacgatgctctacgaaatacttgatgaggtctttcaggttcagcaaacgaggacgtccgtgtaccaatgctacgttgtttacgccgaaagaagtctgcaacaatgtcatcttgtagagcttgttcagcactacactggcgttggcatcgcgttttacgtcgatgacgatgcgcataccttcgcggtcagactcgtcgttggcattggaaatgccctctatcttcttttcgttggccaaatcggcgatggatttgattaattcggccttatttactccgtaagggatttcggttacaacgattttatcatgcgtggaagatgtttcaatctcagccttggcgcgcattacgacacgtccgcgaccagtcatgtaggcttcgcgcacaccgctcataccatatatataaccgcctgtcgggaagtcgggagctttgacgtaagtcatcaaatcttcgatgtcgatatcattattgtcgatatatgcgacgcaggcatctatcacttcggacagattatgggtcggcatattcgtggccatacctacggcgataccggaagcaccgttaacaagaaggttcggaatgcgggtcggcattacggtaggttccagcaacgagtcatcgaagttggtttgcatgtctacagtctctttatcaagatcctgcatcatttcttctccaatcttttgcaagcggcattccgtgtaacgcatggcggctgcgctgtcaccgtccacagaaccgtagttgccttgtccgtctacaagcatgtagcgcatagcccacggctgtgccatacggacgagagcgccatatacggataagtcaccgtgcgggtgatatttacctaatacctcaccgacaactctcgcagatttcttatagggtttatccgacgtatttcccagtcccatcataccgaaaagaattcttcggtgaacaggtttaaaaccatctctaacatccggaagggcacgtgaaacaatgaccgacatggagtagtcaatgtacgaagacttcatttcctcctcgatgttaatctttataattctgtcttgttcaagcatttaaaaagattattaattatacatttgcgggtttgtgaaaaaccacgctaaagtactgcttttttacgatatacaaaagttttccctcataaactttgttgcagatttccatgcttgaaaccccgtttggatgtatggtttttcgtttgatgtataatcggttaaaaataagacagatacaagtaccagaaagatacctccctttggtactcggtgtaccttactaaggtacgagccgtaccaagcttaggtatatgaagtttcttaggttggtacatcgaataccaaccgttggtacggatgaaattcccacgtattataatataatgtgtagggcgaaccggaaagatgtgatttatggcacgggatttgtatattattaatccagtttatggtatgcaatataaagaaatgcgtatctttgtcagtcaaaacctttaattaaggagataaaaattatatgaacaatcaattttcacaaagagtttctgatattataacttatagcaaggaagaagccaatcgactgagaaatagatatattggcccggagcatcttctgctcggcatgctacgtgacggtggaggaaaagctatcgagatattgatgaaactcgatatagacttgaagcaagtaaaaaagcgcattgaaagcttcttgagagatgccgaagacgacaccctattacccgatgcggatgtgccattgtcgccaatggccgctaagatattgaagatgtgcattctggaagcgcgcattttaaagagttcaacagccgatgccgaacatgtgctgttggctatactgaaggatggcgacaacctggctgccaccgtcctggaagagaaccaggtgaattatcaagctgtatttgaacagcttacaatgcaatccaccaacccgaatgctggtatgggatttccggaagaagaggaagaagaggatgaagacatgaacatgtcccactcttctcgcaatgcaggacaaggagcggcttcttctgcacagactgcctcgaagaagtcttccaatgatactccggtcctggataacttcggtacggacatgacccgtgcggcagaagaaggcaagctcgatccggttgtagggcgtgagcgtgagatagaacgcttggcgcagatattgagtcgtcgtaagaaaaacaatccggtgctgattggtgagccgggtgtcggcaagtcggctattgtagaggggttggcactgcgtatcgttcaaaagaaagtatcccgtatcttgtttgacaagcgggtgataatgctcgatatggcctctgttgtagccggaaccaaataccgcggacagtttgaagagcgcattcgctccattatcaatgagttgcagaagaatccgaacgtaatcttgttcatagacgagattcatactattgtaggcgccggtgcagctgccggttctatggatgcagccaatatgttgaagccggctttggctcgcggcgaaatacaatgtatcggtgctaccacgcttgacgaatacagaaagaatatcgagaaagacggtgctttggagcgtcgttttcagaaagttatagtagaacccactactccggaagaaacgctccagatactgagaaacataaaagagaagtacgaagaccatcataatgtgagctatacggacgaagcgttagaggcatgtgtcaagttggcagagcgttatataaccgaccgtaacttcccggataaagccattgatgctttggacgaagccggttcgcgtgtgcatctgacgaacattaatgttcccaaagagattgaagagcaagaaaagctgatagaagacgcacgtgttttgaaggctgaagccgtaaagtcgcagaactttgaactggccgccagttatcgggatagagagaaagaactttccgctcgcctggatgaaatgaaagaggaatgggaagtacgtctcaaagacgaccgtcagctcgttggagaggaagaaatagccaatgtcatatcgatgatgtccggtattccggtgcaacgtatggctcaggcggaaagccttaagcttgcaggtatgaaagaagatttgcaggcaaaagttgtggctcaggatgctgcgatagaaaaacttaccaaagccatcctgcgcagccgtgtaggcttgaaagaccctaaccgccctatcggaacgtttatgtttctcggtcctaccggcgtgggtaaaacgcatttggccaagcagttggctaaatatatgtttggttccagcgatgcgctgatacgcattgatatgagcgaatatatggagaaatatacggtgtcccgtatgattggagcggccccggggtatgtcggttatgaggaaggcggacagttgactgagaaggtacgccggaaaccttattccatagtgctgttggacgaaattgaaaaagctcacccggatgtgttcaatatcttgttgcaggtgttggatgagggacgtcttactgacaattatggcagaacgattgactttaagaatacagtcatcatcatgacctccaatatcggtacccgccagttgaaagagttcggtcgtggcgtaggttttgcggcacaggcacgtacggatgataacgagtactcgcgcagtgtgattcagaaagcattgaacaagacctttgctcctgagttcctgaaccgtctggatgaaatcataacgtttgaccagctttcgctggatgccattacgaagattgtggacatagagctgaaaggtttgtatgaacggattgaagccattggctataagatggttgtagatgatgaagccaagagattccttgctgccaaaggctacgatgtgcagtttggcgcccgtccgttgaagcgtgccattcagaattatctggaagacggactttcggagctgattgtgtctgccggattacagcccggtgatacggttaatgtttctgtcgataaggaaaaagatgagttgagtataaccaaagcctaacaagcctttataataaaacagtcaaaatgtcagttctccgggactggcattttttttgtgttcagtttgccaaaacaataaaaatacaaatctaaaaatataaacttagtatgcaaaaaggaaatattggggtaactacagagaatatcttccccgttatcaaaaagtttttgtacagtgaccatgaaatcttccttcgtgagttagtctctaatgccgtcgatgctacccagaaacttaaaacactggcttctatcggtgagtttaagggtgaactcggtgatttgaccgtgcatgtgtctttaggcaaggatacgattaccgtatccgatcgtggtatcggcctgacggcagaagaaatagataaatacatcaatcagattgcattctcgggagccaacgacttcctggagaaatataagaatgatgccaatgccattatcggtcatttcggacttggcttttactcggcttttatggttgccaagaaggtcgaaatcatcaccaaatcctatcaggatggtgctaaagccgtgaaatggacttgcgacggtagtccggagtttaccatcgaagatacggacaaggcagaacgcggtacggatatcgttctttatatagacgacgattgcaaggaattccttgaagaagcgcgcatctcttctcttttgaagaagtattgcagcttccttcctattcctgttgcattcggcaagaaaaaagaatggaaagacggcaagcaggttgaaacatccgaagataacatcatcaacaacgctaatccgttgtggacgctgaagcccagcgaattaaaagacgaggattacaagaagttctatcgcgacctctatccgatgtccgatgaacccttgttctggatacatctgaacgtggattatccgttccatcttactggtattctgtacttcccgaaggtaaagagcaatatagagttgaacaagaacaaaatccagctttattgcaatcaggtctatgtaacggactctgtagagggtattgttccggactttctgacattgctgcacggtgtactcgattcgccggatattccgctgaacgtgtcccgttcctatttgcagagtgactccaatgtgaagaaaatctctacatatattacgaagaaagtatccgatcgcttgcaatccatattcaagaacgaccgtaagcaatttgaagagaagtggaacgatttgaaaatcttcattaactacggaatgctcacacaagaggatttctatgatagggcaaaggatttcgcccttctttccgatacggatgacaagtattataccttcgaagagtataagaccttgataaaggatagccagacggataaggatggcaatctgatttatctgtatgccaacaacaaagatgagcaatacagctatatcgaggctgccaagaataagggatataatgtgctgttgatgggcggccagcttgatgttgccatggtaagcatgctggagcaaaagttcgagaaagtgcgtttcacccgtgtagacagtgatgtcgttgacaatctgatagtgaaggaagacaaggcgaaagatgtcttggaagccgataaacaggaggttctctctgttatcttcaagagccagttgccgcagatagaaaagacagagttcaatgtaatggctcaagctttgggtgaaaatgcttcaccggtcatgattactcaaagcgagtacatgcgtcgtatgaaagaaatggctaatatccaggcaggaatgagtttctatggcgaaatgccggacatgttcaacctggtattgaatgccgaccataagctggtaaaagagattctggctgatgaagacaaggaatgtgcggctgccgttgctccgattcaaaaagaaatggacgatgtaaatactcgtcgtaatgaattgaaaaagaagcaggagggcaagaaagatgaggatattcctacaatcgaaaaggatgaggtaaatgatttggataagaagtgggaagatttgaaaaaccggaaaaatggattgtttgccgactatgccgctcagaataaggttgtccgtcaacttattgatttggcattgcttcaaaatggcatgttgaaaggtgaagctttgaataattttgtaaagagaagcatcgatttgattaaataagcccctttagatttctattataacagggcattgcagctaatatgagttgtaatgccctttttttgtctgttttttcgtaataggtctgttttttttcgttggatacgaggtttttggaaacaattgtctatatttgagcattgaataaattagtatatttcactcgaaaccgtattcatgaaaagattttttttgtttttgtcagcctgtttattgcttctgccgtttgtgcaagctcagaaagtaggacttgttttgagtggcggaggtgcgaaaggcatgacccatatcggtatcattcgcgctttggaggaaaacaatattcctatcgactacattacgggtacttctatgggagctatcataggttcactctatgctatggggtactctcccgatgatatggaggctttattgcgttccgaagacttcaaacgctggtattcaggacaggtagaacccgaatacggatattatttcaaacagaaccggccgaccccggagtttttcaatatccgtttctcctttaaggactcgctgcatatcaagcctcagatacttcctacaagcatggtaaatcccattcagatgaatctggtctttgtggagctatttgcacgggctacggctgcatgcagcggcgattttaaccgcctgtttgtgcctttccggtgtattgcctccgatgtatataacaagaaaccgttgattatgcgtagaggagatttgggagatgcggtacgcgcttccatgagttttccgtttgttttcaaaccgatagagattgatagcgttttagcttatgacggtggaatttataataatttccccacagatattatgcgtgaggactttaaaccggaagtcatcataggtagcgtggtagccgccaaccccggtaagccgaaagagaatgatttgatgagccagcttgaaaatatgattatgcagaagacggattatactcttccggattctttaggcattattatgacattcaagtatgatgatgtcagccttttggactttgaccgtttgcaggagttgcacgatatcggctataaccggactatcagtttaatggattctataaaaggtcgtattcatcggagggtaagtgcggaaaatgttcgtttaaggcggttggtctaccgcagtaatttgcctcaattccgctttagggacatctatatagagggcgccaatccacaacagcaggcgtatatcaaaaaagaatttcatgacgaagaccatgaggtgtttacatatgaagatttgaaacgtggatattttcgtttgctgtctgataatatgatatcggagattatacctcatgctgtatatgactctgaaaacgacttgtattcgctgcatctgaaagtgaaaatggaagataatttttctgtaaggatgggtggaagtgtatcgacaaccagctctaatcagatttatttgggattgggttatcaggacttgaattattattccaaagaaataacccttgacggccagattggcaaggtatataataatgcgcagcttatggccaagatagaccttcctacccgtattccaacctcttaccgccttattgcttctttaagtacgttcgagtattataaaaaggacaaactcttttctaagaatgataagccctcttttaactctaaagatgaacgttttgtcaagctgatggtagccttgccttttttggccaataaacgggcggaaataagcatcggatatgggaaacttcaagacaattactttcagtccagtgtgattaattttgacaaggaccgttcggataggagtacctacaaccttttgggaggggctattggattttatgggagtacgctgaatgcacgacagtatgccactaaagggtattttgaaaaactggtggcacaggtctttagcggaaaggagaaatttataccgggaaatccgacggaaacgagtgttacgactaaagaaaggcaatcttggctgcaaatttcttatatgaaatatgcctatcatactatgagtcccaaatttactttgggatggatggcagagatgctgtattcatcgaagaacttttcggagaattatacggcaaccatgttgcaggcggcagatttttctcctactcctcatagtaagttaatgtataatgaagcattccgggccaaccaattcttggcagcgggtatcaagcctatttttgttttcaatgatatgttccaattccgttctgaattttatggtttcgtaccgatatttcctattaaaaagaatgcattgaacaaagcttattatggaaaagcgttttcgcgatttgaatatataggagaaatttctgtaatatgccaattgccctttggagcaatatctgcatatgtaaatcattatagctcaccgaaaaaggagtggaatgtggggttgacactcggctggcagctgtttaattatcggttcatcgagtaatttttttcaaaaaaagtttgtgtatctcttgctaattcaaaaaaagtacgtatctttgcacccgtaaaacaaacaaggccgcgtagctcaactgaatagagtagctgactacggatcagccggttacaggtttgaatcctgtcgcggtcacaaattgttaataataaaggtcgcgtagctcaactgaatagagtagctgactacggatcagccggttacaggtttgaatcctgtcgcgatcacagagagcctctacaaatatattttgtagaggatttttgttttttgcacagaaacttcgggtcaacttcgggtcaacgtaaaaacctgagggattcatagcttatgcataaattttcgccagtctgaacaggaagaaagctctgtcctttactcctctgaattgtgtgcggaactcctttatttttgcattgaacgattcggaagcagcgtttgttgaacgtctgtcaaagaagttgattatttcccggtaatgcatctgtacggaacgtgccactcttccgaaagcaagaaaccctgatttttccacctcgtcataccagcgggcaagatgcgtcaatgccgcatccttgtacctgcattggtggtatatcagtccgagcctcatggagaggtagtatgctttcttaatatcgggatactcccggaacaggatgccggcgcgtacgcgctgtgattccgtccacaaggattccttcttatataacaggtaaatgcttctcgaaagaagctgtttgcgtgaatcaccgttttcaaagaccggcgcatgatatatcttcccgcaggctttggcatgggcgatctgaacggattcttcgtccaaagcctcccaacgtgctttaacgcgcatatcctgaaccgcctcataagcgagtttctgcacatggaaacggtctgtgacgcggcgtgcggcgggaaaacagaggcgggcgatctgctccatgttcggagccatatccatggttatctccctgacctgaaagcgtctgcggcgggaaagacggagcagtacggaggtcacggtctttacatctgttcctttcacaacggcgataagactgcccgaacggccttttctctccttgtttatcaacacggtatataattctccgcgggaaaggcagacttcatccagtcccacataaacaccgatgttcttctcgaaaagaagccattcttcggcatgaggaagctgctcccaacagagataaccgctcaggtgattccggtattgccgctcgagcagttccccgtcgaccccgaacagcgttcccaacagcctgcagcccaccggcagcttatcaatataattcttttaaaaaagacgcaaattcatgcgtcatacggctaccaccggcaaccagtttccagtcacggctcacgtaacggttctcatccttgacaacccacctgcgccggcgcacgttcagaaaaagcttcttgccgcgtatggggaaatcctgaaccacaacaggttcgtaaaaacccttgctctcaactttcattcctgcgtattctttaggaacttcattcttttcttctaaataaatcactatttccgatgcgctttcctttacgtccgagatgatgaaataatccaatgtcccttcaggaagaaggagacggtagccgttgttgtccataagatttctgagttagttttatgcaaagataggatttttacaaatattacccctcaggtttttacattgacccgaactttacataaaaaaagagatgtgtcaattttgacacatctcttccatatatactaaataagatttgtactcagcatttaatattcaattcatccaatatcttccgcattgcttcaaaagtcgtgattctggtaggcactaatggtaggcgaagtttgttctcaatcattcccattgcattcaacatggcttttactccggctggattaccgtctacaaagagtaatttgaataattctgcaaatttgtggtggatggtcagcgcatttgagtaatctccttgcaatgccagacgtaccatacgactaaattcacgcggaaaggcgtttcctatgaccgagatgataccaacggctcctaaggtaatcagagggaaggtaatgccgtcatcgcctgaaataacgtcaaaattggcgggtttattttttatgatgtcatccatctggctgatatctcccgatgcttctttaattgctattacattcttaaagtcgcgtgcgatacgtaaggttgtttcagctttcatatttactccggtacgtcccggtacattataaagtacaatcggaaggtcggtagcctcggaaatcgctttataatgctgataaatcccttcttgggaaggcttgttataataaggaacaacagaaagaatggcatccactccggtaaaatcgtcattcttcagagtttctactatggcgcgagtgttatttccacctactccaagcagaataggtattttcccattcacgcgctcgataaccattttcttgattttctttttttcttcttcagtcagcgtcggagtttctgctgtagtgccaagtacgcataaaaaatcagtgttgttttggagctgatagtctactaaacgcatcaatgcatcgtaatcaacgctttcatcctctttaaatggagtaatcagcgctacccccattcctttcaatctagtctgtatcatgagtattataaagtaatctctaattaaacgactcgcaaaagtacgatttttttcaatttaccatacaaatataagccataaaaaagctttttgtagaaatttgttaggatatgagtgtcagaaactcatcttcgctcatgagctttatccctaatttatgagctttttccaatttggcgggtcccatattctcgcccgccagaataaaactggttttggcagagatactgcctacattttttccaccgtttttttctatcagctctttgtattcatctcgtgaatgatgtgtgaaaacaccgcttatgacaatggattgtcctgccaacttatccgtatatccgcttaaatcttcttctctgcgatagagctgtaatccggtggatttcaaacgttctatcaactcgcggttcaatggatttgcgaaatacgtcagaatgctttgtgctattttttccccgatttcatcgatgtttatcagtttttcgaggttggcattttccagctcgtctatatcattaaaagacttggctattttcttggctacagtttcgcctacaaaacggatgcctaaagcgaagagcactctttcaaatggaacctctttgctcgcttcgattcctttgatgatattctccgctgatttttcacccatacggtccaggttcttaatatcatctgctgtgagctgatataaatctgccgtattcttgattagtcccaaacggtagaacatatctacggtttccgggcctaagccatctatattcattgccttacggctaatgaaatgctctatcttacctttaatttgaggtgggcaggatgtttcgttaggacaataatgggctgcttccccttcgtatcgtatcagtttactgccacattcgggacagtgagtgataaatttcactttttcaccgataagcatgctgcgggcgtctttgtctactcccgtaattttaggaatgatttctccacctttctctacataaaccatgtctccgatatgtaaatccagcccttcaataatatcggcattgtgcagagaagcccttttcacgatagtgccggacagttgtaccggatctaaattggcaacgggagttacggctccggtgcgtcctacttgataagtgaccttgtttaaacgagtcaaggcgcgttctgcctgaaacttatatgctatagcccatcggggagattttgcggtaaaaccgaggtttttctgctggcgcatactgttgacttttaaaacaataccgtctgttgctaccggcaagttctttcgttcggtgtcccaatatctgatatattcaaatacttcttccaggctatgagcctttttcatgtgttccgaggttttaaatccccaaccggctgctgcttgtaaattttcataatgtccgtcacagggcaattcttctcctaacagataatacaaataggcatcaagcttgcgtgaggctacaatagcggaattttgcaactttaaagtaccggaagctgcattgcgcggattggcgaaaagcggttcttcacgcgcttctttttcccggttcagttcttcaaacacttcccagggcattaatatttctcctctgatttcaaacgactcaggatagctgccgtggagcactaatggtatcgtgcggatcgtttttacattatccgttacatcatcacctttttcaccgtcaccacgggttacggcacgtaccaatttgccgttttcgtaggtcagtgaaatggatgtgccgtcgtatttcaattcacagcatatttcaaagtcttcgttcagagccttcttcacccggtcataaaagtctgtcacttcactttccgaataggtgtttcccaatgagagcatgggatatttatgggctacctgtgtgaagtttttattcaaatcgcttcctacgcgcatggtaggcgaattgtcgtcctggtattcgggatgttccttttcaagctcttgtaattcgcgcatcctgtcatcgaactctttgtctgatatttcgggagcgttcaatacataataattgtagttgtgccgatgtaagtcggcgcgtagctggtctatcttttcttttactgtcataacgattttggagtttggacacaaaaatacgggtttctcccgaatattttttgcttttactcttaacttacactatttttgcggaaaaaataaaatatatgcgtattgatatcattactgttctgccggaaatgattgaaggcttcttcaattgctctataatgaaacgtgctcaaaataaagggcttgcagaaatacatattcataaccttcgtgattatactgaagataaataccgtcgggtggatgattatccttttggtggttttgccggaatggttatgaagatagaacctatagagcgctgcatcaatgctttgaaagccgaacgggagtatgatgaggtcattttcacgactccggatggtgaacagtttaaccagcctatggctaatacgctgtctctcgctaaaaatcttataattctttgcgggcattttaagggaattgattaccgtatccgcgaacatctcataacgaaggaaatcagtatcggagactatgtattgactggtggcgaactggcggcggccgttatggctgatgctattgtacgtattattcccggagttatctctgacgagcaatcggccctttccgattcttttcaggataatctgttagctgctcccgtttatacgcgcccggctgattacaaaggatggaaagttccggaaattttactatccggccatgaggctaaaattaaggaatgggagctgcaacagtcattggaaagaactcggaaattacgtccggatttgttaggtgagtaatctgtaagatgtaaatgaaaataaaaagggcattcagtttgaatgtccttttttatgaaaatagtttgcgaatggctatgctttgttattcgtcatacctcaagtgcaccgattatttctttaactgacttatatccgtgtctgttcagatagtcatcaataccttctgcgaccttcacggtgattgccggattaataaagtttgcagtaccgatttgaatggcagaggcacctgcgagcataaattccacagcatctttccagttcatgatgccccctaaacctatgaccggtatttttactgccttagcaacctgccataccatacggagtgcaataggtttcactgccgctccggacatgccacctgttactgtggaaaggatgggacgtctgcgttctgcatctacagccattcctaacaaggtattgatgagtgatacgctgtctgcaccgccattttcagcagcacgtgctatttctgtgatgtctgtaacattgggtgacagttttacgataagtgtctttttgtaaactgagcgtacggcttttaccacttcctccgctcctttggctgtgacgccaaatgccattccaccttgctttacattagggcaggatatgtttaattctatggcaggaatatttacaagttcattaatgattgcagccgtttccatataatcttcgatagcagagcctgaaacattcacaatcatattggtttttatatccttgatacgcggatagatatgttcaacaaagtaatgtacacccttattttgcagtcccacagcgtttaacatacctgatggagtctctgccatacgcggatacggattaccttcacgtttgtgaagagtagttccctttacaattataccacctattcgcgatatatcgatgaaatcggcgaattcttcaccatatccaaaagttccggatgctgtcatcaccggatttttcatttgcaattcaccaatgtttacacttaaatctgccataatagtttgtttatattaaaaaccggaccttctttacatacgcataaatgaccttctgtggtattttccacacaacataagcaagcgcctatgccgcatgccatcatgttttctaaagacacttcacaattagtgcctttacttttggcatatttggctacagccatcatcattggtttaggaccgcaggtatatatttgttcgaagtttaccttgctcaatatagaatgttgggtgacatatcctttttcgccatgactgccgtcttccgtggtggtatatacatctccataggcagcaaaatcttccaattgcaacaagtctttatcgcttctggcacctaataagaaggtgggtttgcttccgtttttcgccaattgctcgcctaaatacaacatcggtgctgtacctacgccgccacctactaataagagcttatccgagggcttttcaggcattgtgaagctgtttcctaatggaagtaccacattgattatatctccttgttttgccgctcctaatcgcttggttccatctcctacaagttggattagaaaccacacctcattccgttgtttgtctacataattaatagagatagggcgtcgcaggaaagtagtgggtgaaccgtctacgcgaatttcggcaaattgtcccggaagcatttccgggagcagggacggggaagtcaatttcagcagcgcataattggcatgcagtcggacgttctcggtcactgtcagatctaaaatatattttttcatattatctataaagaaggattatcttttgactgcaaagatacgggaatttgtgcaaatagccgtagttgcctcttaattttccggtttgaatgtttcataagtattatcatcaaagaaaattcttatttctgttatttttttaggcggtctttctttatagataatttcttgttttacaacctctttaggcgtatttactggagcttctaacgcgatttccttgcgattttccggagtgcttggctcgttggacggattttccggattgtcagcaaataaaggatagtcgaatccgttgttttcaacggatggagaattattgctcatgtttccttttcctgttagcagccattcaaggttgatgtcattataccgcttgtgaagtttcagaatgacttctgtacttggattattacgggaggctaatatatgggaaatagtggcttgagctacttctatattttcggcaaatgctccggcagttaactgctccctgtccattatcatcttaaatctatcctttatactcatggcgtagatattattacaattgtataagtctttaaatccgattacaaaagtaaataataggatttacaaaagcaaattacgagtgtaatattttgaaatttacaattatactcagtaaatttacttatgtcaagcatatatttgtaaagaggttatttttcatgaaaaatacctctaatactagctttaataaaatacattattgtgttgatttacagtttaatatattatattataataggagtattacagagattacaaatgttttgacgtctatttcttatatttataatttaaaagtctaataaatagttgtatatatcagatttataatgatatacactatgattaatatgttgttaactgctcacatgataaagatgtaataatgtatataatagacgtaaacatccctatttacaaaagtattaatcatctgttatgtatgcatgttatatatttagctttgtaatatatacgtttgtgaatactgtgtattacattggtaatgcttcatagttgtatagtacaactattcctctatccggtttataaatcctggtaaagtaatactcgattctaaaagaaaattggtgacaaaattgggaagcgactctatgttatcagtcttatgaaggtcaacaataaattctttgctttatttcaatataaatacccgaatgattgaaaagaaacgattctcagaggcttattttgaatgtattatactgtattatagtatattatgtgtgtatttaattgccggataaatcatgaaaatagaaaaaaagggggaaaatccccctaaatatgataaaatgacacataaatgaatcattttcgtattttcttcttttattaaaaagatatggaatgagaaaatcaatgcaggattttaaagaccaattcccgtaaaaggtcgctatcgtttaaggaagggtttcctactcctttagacttggcatctgtatatcgtatctctccgatgatctgcatggtttttattccattgtacatcctcatggcatttagatattcgcgggactgccacgggctcttcagacctaagaatgctgcgatgccttgctccgatttttcgggggcataataggccagcatcagattggaaaagaatccgaaaagtaaagataaagtcatttgaatcggattggtttttggattttcttcaaaatattttattattctgttagcctttagaacatccttttccacgatggcgctgcggagttcaaagttattataatccttgctgattcctatgttgcgttctatctgttcgggggtgacacgtgtctgaccttttggaagtgtaataatcagtttttccagttctccggtaaggcggctgaggtctgtccctacgaagtcggcaagcatggaagtggctttcggttcaaggtctattcctttacgtttcatataggatgtgatgaataccggcagttgggattctttcactttcctggactcaaacagtatgcccgacttctctatttcagctgcgagttttttccttttatccaatacgccatgtttgtggcatattaccaatattgtagatagcaagggtttttgaaggtagtaggaaagctcttctatattgcgtatgttctgtgcttccttcactactaccacttggtgctcggacatcatgggatagcgtttggctgcattgataattgcagccacgtccacatctgcgccatatacaacggtgaggttgaattctttttcggtttcattcagtacgttgtccgttatataatccgagatgaggtcgatgtaatacggttcttcgcccatcaggtaatagatgggacgatattgcccggctttcagttcccttaagatatcattgcacgtaatttcttgcttggccatatttcttggttttaccagtcgaatttcagatgttttacggttttcttcgcatcaataatcatgcgcagagatgcaatgccgatttcaacatgttcctttacatagttttgggttactatgttatcgcttttatcggttttgacgccttccggaatcatcggttggtcggacaccaacaacaaagctccggtggggatatgattggcaaagccgcaactgaacaaggttgccgtttccatatcgactgccatggcacgggtttttttgagatactccttaaagtcctcatcgtgttcccaaatacggcggttggtggtatatacagtaccggtccagtaatcgcgggcatggtcgcgaatggcggaagaaacggcacgttgcagcataaaagccggcagtgaaggaacttccggcgggaagtagtcgtttgaagtaccctcaccgcggatggcggcgattggaaggataagatcccctatcctgtttttcttgtcgatgcctccacacttgcccaaaaacaggcatgctttgggctgaatggcacttaataagtccatgatgatggcggcattggggcttcccattccgaagtttacgatcgttattccttccgcactggccgaaatcatattagcgtccctgcctagtatgggaacattgaatttttcggcaaaaatttcgacatacttgttgaagttggtcaacagaatatactcttcaaaatcctccaggttacgttttgtgtaacggggcagccaattagctacgatttcttcttttgttttcataagatttcattaaatttgttccgtaaaaccgttagggaacgattatttaactcacaaaaatacaataaaaaagtaaaaacaagaaattaaaatagaatgttctcactgaacctgccggcgtttgaagccaagattattacaagggatggaaaaagaagtattttcgatgttatccgccgccgatatgttgccttgaccccggaagaatgggtgcggcagcatttcgtacattttctcatgacgcataagggctatccgcaggcactgatggcaaacgaggtgcaggtgcagttgaacggtactaaaaagcgctgcgatacagttctttacaggcgtgaccttacggcacgcatgattgtggaatataaggctcccgaggtggaaatcactcagaaggtcttcgaccagattacccgttacaacatggtgttgaaagtggactatctgatagtaagtaacggtatccggcattattgctgccgtatggattacgaacagaacagttatacttttttacaagatattccagactacgcaagcctctgattttaccggctgaatgaaccgtaatgaatcagggagtgaatgcctttcactccctgattcattgtctttcactccctaactcattacattccctttcagaacaccttcctgaggggattgaaaagaacggcaaccatgtaaacacgatagcaaaaaagatgcacttcccccactctttcctacttcatttcgtcgtataccatccgggaaatgtgtgcgatgatagcggcattctcttcgtccgtttcacttgagtccgttacgaagacagcgatataatacttcttgccaccgggcatgattactactccggcatcattatctgccatcttcacgcctttcaaattacgatcggaagaaccggttttatgccccacaaccgtattggaaggcaataagccttttagtttgttgcttcctgtggctgtttctgtcatagttttccaaaggaaatcccggtacacgggggcgaataaatttttctcatcggccattttcagtaaccgtaccatttcagaaggggtgctccaattggagtatgccttttggggattccggtgcatggaatcttccgtttcggacaaattgaaatcattgatgcccaatttcctgatgtactgatgaatatgccctattccaccggcatattctatgaggatgtcgcaggcattgttatcgcttagcgagatactgtattgtaaaagctctcccaatgatatatccagatcttgactggaatgcttttgccgcagcggactgtaggtatttggctgtaattgggaagcttttacatgaacaatatgtttcaatgggatttcctctctgttcattttatccaatacggccagggctacatggaatttgaatacgctcagaagcggatagtgcacctcgttgttgtgtagtatggtttcgtctttgtctgtcagtacggctacgccgaccgtggctttcttccctttaaggaaaccggcaattttgccttccaatgcctgctgttgtgcttgtagaacgatgtttatgctgaaacacaacacgcctatcaaagtatatctaagcttcatattattaatttcatacatttgttcgagtcaacaaatgtatgaaattaatttaaagagaaaaactgcatttccttatttgcccttattctttccgaatttttcctgcagcttttgcatcagctcatagaagttgggaatatagaccgttgccagcaatgtattcagcgccataccgaatactactgccgctccaagggcgacgcggcttcccgctcccgcccctgtggcgaacagaagcggcataactcccaatacaaacgccaatgaggtcatcagaatgggacgaagccggatatgtcctgcctggaacgcggcgtcacggatactgttgccctgtgcacggaagtcgcgtgcaaactccacaatcaggataccgtttttggcggatagcgccactaacaggattataccgatttgcgtatagatgctgaccggagttcccatcacatagcaacctagcattgcgccgagtaatgccaccggaattcccattactgctgccaccggacttgtccagctttcatactgtgcggcaagtacaaggaaggccactaacaacgccatgataaagactacggtagtggtggttcctgcctgcgtttcctggtaggcaacggaagtccattcatagccgaattcattgccgagttgggtctttatcaagttttccgcttgcttgatggcttctccggaactgcttcccggggctgcattgcaggtgacggatgcggtagagtacatattataccggttgatttggtccatacccagttgctcgtctatctgtgtgaaggaagagaaaggaaccatttctcccgaagcattgggtacgcctaacttgaggacgtcgtcgataatacgttgggcacggtcgccagcacccagcttcacctgatatatacgtccgaactgtacataatcattaatgtaggcttctcccatataataccctaaagccgtgaaaacactgttcaactgtatgcccatcaattgcactttgtcgcggtctatattcaggaaatattgggggacattggcctgatactggctgctgacggatgccaaagccggataattgcggtaattttccattaaagtttccacggcacgctgcatttcggtggcgccgagattgttacggtcttccaattgcagttgcagtccgccggtagcgcccagccccggaatggcaggcggaaccattgcaaagacctcagcttcctgaatgccataggcttccatgttgaaacgatcgacaatggccgctgccgtgtgttttttccccttacgctcatcccagtttttcaggactacgaagtaggtagcggcattactctgctctccgccacccataacggaaaagccggatatgccgatgtaatcctttacttcgggataggtgtcgagcagagcgtttatttgtttccccacctcttgcgtgcgctccaggctcgatgcaggtggaagttgcacaacagcgaggaaatatccgtcgtcttcttccggtatgaaagtagagggccacttaacgaacagcaacacagcgattatcgtaaatgcagcgtatgaaatcactgcggcaaaaggtctttgcagcagatagcccactgttttgtcatacattccttgtgtcttgtcatacagacggttgaagcctttatacagagggaatttcgagggtttggtgggctggagcatcaatgcgcagagtgcgggcgtcagcgtcagtgagttgatgccgcttagcacggtactggcagcaatggtcaaggcaaactgcttgtacaattgtcccgaaatcccgctgacaagcatggtagggataaatacggcaagcaacaccagcactactcccacaatggggcctgtaatctctcccattgcttcggttacggcttgccgggcggtgtaccgtcccgtatccaacagacgtgtggagttttccacgaccacaatggcgtcgtccaccacgatggcaaccgccaatatcagcccgaacaacgttaaagtattgatagagaaaccgaataatgacatgattgccaacgtaccgatcagtgaaacgggaattgtgatacaaggaatgatgacagcccgccaattctgcagaaaaaggaagattacaagcactaccaatagcgttgtttcaaagaaagttaccattacttcatcgatggatgcatggataacgtctgttgtatcgagcgttacattatattgtacacctgccggaaaattctgcgataattcctgcatcttcgctttgacgcccgtcaatacatccagtgaattactgcccggttgctggtagatggcgatggcagccgtaggctttccgtccagttgggaaacaacgctgtaagatgccgatcccaggtctatatgggctacgtcacgcagacggagaatccgcccgccgctttccgtacggaggataatgttaccgaactcttcgggtgaagtgagccgcccctttacagtcaggctgtattgataggcattcttgttctcatttccgatgggttgtcctacgttgccggcactgacctctacattctgcgtctgaatggcttgatacacatcagccggtgagagattgcggatgcgcatggcggcagggtcgagccagatacgcatggaatagtcccctgcccccattacgttgactgcacccacaccgggcacgcgggtcagttggtctacgaggttcagtttggcatagttgctgaggtaaagaccgtcgtaatctttgttgtcggacttcatggtcaggaacataacgatattgctggactgcttctgcaccgtaaccccctgcactactacgggagcaggcagcgatgactgtgctacgctgacgcggttctgtacctgtacggtggccatgtcaatatctgtgcctactgcaaaagtgacagtgagcgaatacgcccccgatgaggatgagttggacgacatataaagcattccgtccactccgttgacctgctgttcgataggaataccgacggtttgagctaccgtctgtgcattggctccgggataaacggcgctcacctgcaccgtaggaggtgttatgtccggatattgcgcaatgggcagaatacccagtgtgaccagtcccgctacgacgatgagcagtgccagtacggttgcaaatatgggacggtctatgaagaattttgaaaacatgattctttggttttgaatggttatatatacagtgtggattattgaacgggatttatccgcatgccgtttctgactttcatcagggctttcgtcacataccgctcctgcggggaaagtccttgttttatctggcgcagactgtcacctatcagttgtcctgtttcgatgtgacggtagtgtacgatgtccgagtcgttgactacgtacacgtatttgcccaactggtctgtgccgatagaagcatcgggtatcaggattgcgtttttctgttttccgtaaggcagcgtgatgctgacataaagcccgctcttcaagattcctttgggattatccagtcgggcacggatattcagcgtcccggtgttcaagtctacattgggcgacagataatccaactgtgccgggtaattcagtatgccgtctttccccaggctgacgttaacctgtttgggaatgctgtctccttgctgcaataacatggcaagccattgattgtcggctacattaaaataagagtacagatgatcgtctttatagacagtggccaaagttacaggttgtacgctgccgtttatataacttcctgcatctgcaaggttgcggctgattgttccgttgaacggggcacgtaccgtacagtaactcaaattggtccgtgccgtatttaatgcagcttcggcattgcttaccgctgccagcgaagtagctacatccgacttggattgcaatacctgtatctggctgacggcatctgtttttgctgcttcctgcatacgcgcataattactctgtgcatattcaagattggcacgtgccgtattcaaagcagcttccgcttgcctcacattatcctgataaacagtaggctcaatctggaagagtacctgcccctggcgtacccggctgccgggtgcataggctatggtctgcaacgttccgctgaccctgcccactaaatccactgttttttcagaagtcagatagccgggatagtttttggtaagcgtaatgtcttgcacacttgggcgggctacactgatttccggtacgggcattgcatgcgacgtttcttttttattcccgcatcctgccaacaaaggtagggcaagcagggcgatgtacatttgatttttcatatatggttcagtttaaattcagttgagtatgtatatattatatatgtttatttatgatttgcggctgatgtacctaaaatcataatcctgaaatgatgtttccgtaccctccccctaatgctttatagagagagatgagctcctgcagtgagtttccttgtgcttgcgtcagttggttttgataagccagcaatgaacgaagggcatccaggacattttgaaaaggggttagcccctgcttatagagatctaatgacagcttcaacgtctcctctccctgattgcatacttcgcgcagggctacaatctgcttgatggaattgcggtagccgttcatggcattgtctgtttcctgtacggctgtgagcacggtttggttaaactgatggatagactcatccaattgcgcacgtgccagccgggtggcattaaccagttttgtaccgttgaagagtgtccaactgaggcttggtgctatttcaaacgtcatactgttccgtttggtgaaatctttcaggtcatgggaagaatatcctacggaaccttttaggaaaacctgtggcagccaatcgcttttagaagcaccgagcagggctgcctgtgcgttgatttgccgttcggcctgccggatatccggacgacggagcagcaagtcggcaggaataccgatgcctacaggttccatatagtcgggaagtttgccgttctgctccaatgtgggacgaaggtcttggggataagttccgagcagaatggccaaagtggtgatatattgattgatacctgcctccagttggggaacagacgctttggtactgtaatatacagacttggcttgagacacatccagtttggaaaccaatccggtcttgtagcgcacttgggtaatctcaagcactgcggcttgcgtattgcaattgcggatgaccacatttaattcctgctgtaattcacgcagcccgatgtaggccgatgctacctgcgcgcatagcgatatcatgacagaggtatattcttccttgctggcggcaaaattttcacgttgcgcttttacccgttgccggatactgccgaatatatccagttcccagcttgcattgagcgaggcgctgtatgccccggttctggattgcggtgcttcacttacattgccgctgctttgttggcgtgcccatccgccattcagggaaacggaagggaagaaactcccccgctctatccgccaattggctttagccatatccatgcggtctatggctgaaagcaccgaaaaattcccggcggatgccgttgctatcagcgaatcgagcatcggatcgccaaaggctttccaccatttatcgtctaccggctgtatttggctgccgaacagattatcgtctccggaaatggtatgggcagtgccggttccccagccttgcggaagcggcttttccaagtagctattgcctttttgcgcccatgccgcaaaagagaaacatagaatgagcaatgtactgctccaagcttttagagtcataaaaaaaggtttaagttgttattttatgggattgataacaacctaaacctttatttgtttatcgcgattcttgcggaatttattcagcgtctgctgctttctttctgctccttgttgtcttttcctttaccggttcctctttcacttccggagcaatacctgccagttccgggtcaatcatgatacgtccgcagtactcgcaaacgatgattttcttacgtgaacggatgtccagttgtctttggggcgggatcttgttgaaacagccgccgcaagcatcgcgctgtacgtaaacgatacccagaccgttgcgtgagttcttgcggatacgcttgaaggattgaagcagacgcggctctattttagtctcgagctctttggctttgtctctcagcttttcttcttcctgtttggtttcggagatgatttcgtccagctcattcttctttacttcaaggtctttttgtctttcttccaaggcagcggtgctgtctgcggcttcctgagacttgacttcttcatcggcagagaactctttgattctcttttcgcagagttcgatttccaaggtttggaactcgatttctttgctcaggaagtcatactcgcggttgttgcgtacattttcctgctgctctttatatttggctacagaagcctttgcggtttcgatttccactttcttcgttgcgatagcagatttcaaatcggcaacttccgactggattctttcgatgcgggtgctcagaccggcaatttcatcttccaagtcttgcacttccaaaggaagctcgcctctcaacgtcttgatttcatcaattttagacaacatggtctgtagctggaacaaggctttcaatttctgttccactgtcaattcctggggatctttttttgcttctttagccattttaattacatgtattttatgggatttgtatttatcttgctttgttgtacttcaacattaggaaataaatcccggattattgtataaaatatttcttttgtatattgttcgctttcataatgccctatctctgccagcagaatatccgtgtcatggccgaaataatcgtgatactttatttcacccgtgatgaaaacgtccgcacggttacgtatggcaagcggcatgagaaaagctcctgcaccgccacacaaggcaacggtctgtatctcccgcccggtgagcctgttgtgcttcagacaacccacttcaaaggttttcttgatacgctttaggaactccaactcggtttccggagtttccaattcgccgataacgcctgctccggcttgttgccaggagttctgcaacggatataaatcaaatgcaggttcttcgtacggatgtgcggcaagtaacgctttgataacttctgctttccggtaagtcggcagaatggtttcgatgcgcgtctccttttccacatgcagctcgccgatttttccgcaataaggattggcgctttcaagagcacggaacatcccctcgccttccacattgtagctgcacgaatcataattgccgatacatccgcatccggcagatgccaatgctgtgcgtacttcttccgcccgggttacgggaacaaatgtaaccaatttcagcaaagcgttttccttagcttccagtacacgtacattcttcaatccgattttttcggcaatcttgaaattcactccttccggcgcattatccagattagtgtgggcggaatagataacaatgtcgttcttgatagctttcaagatacaacgctccacgtaatcttttcccgtaatggatttataacccttaaaaataagcggatgatgcgatatcacaagattatatcctaacgcaatcgcttcatccagtacggcttcagtaacgtcaagacacaacaaagcccctgttgcttccgcatctgtcaatccgatttgcaggccggcattatcaaatccgtcctgcaatggcagaggcgcgaaccgttcaagggcgcttactatctccttaattttcattatcagtagaaaatttggttgcaaagatatgaaaaagtagcgaattacggcttacttttaccttttttttctaccatgacctgtcgtagctttccataagcgtcgaaagacttacgcgaagccagtgaaatggttatcatcagcgaaagcatagatgccgtaaatgtgataaccataatcatcatctgatatttgatggcgacattcggactgcttccccctaatatctgtccgatcattgttccgggaaacgccaccaagcccatgacggagatattggcgatgagcggactgaatgccttgataatagcctgacggataaacggcgcctgcgcttctgtacgggtagccccgttgccaagcagatagcggtaaagctgttgctcgcgtttcaatccgctataataggtattcagggctataacattgctggatagcatgtttcccatcagtatgccgaaaatagggatgaagtattgagcgctgaatacattttcaagacgcaacacgattcctataaaatacatccccacgcatattacgctacataggaaacctacggatataggtatcagcagtatcttgcgcttcagttgtgtgcgcgccagtgccgtttgcgaagctacgagtatcatgacgattacccacaggaaattaatccacggattattccaaagaaaaaggtatttcagataaatgccgatgaagaaaagctgcacaatcatgcgtgccgtaccgataagggttgcacgtagcaggccggtcttgaatttccatatatagaataatgggattgacagcaagagcagtccgatacccaggctgaggtatgatatgtcgatagttcccatgaatactttgaattagcgggtaaatatgaaaaccaatacagatgcaataataatgcaaactcccataacaatcagcatcatgcgtacggtatgtttctgttcggaacattccttttgccgggtaagtctggttattttctccatatcttctgcggttgtgttgtggggcatgccgcaccctttgtgcattttatccaaacgctcgttgagacgttcccggcgaagaaggcgtaaattgcggttctccttatcacggcgtatcatatcaaaaacaaatccggcaaaactcatggctttatttttatcaggtttattacattattatatgtctgtcgcatcctttggcaaaacccatgtcgtgcgataccgccagtatggcggttccctttcgggtttgatgccgtaaaaaggcaagaactctttccgtagagcctgaatcaagtgccgaagttggctcgtccacaatgattaacggcttgttggtcatggaagctacagctatcatcatacgttggcgttggccgccggatatctcatttacacgtttataatatagctctctttccaatcctaattcttcaaagcaattgaataattgcctttcggagaacggtgtggctcggttggctttcaggctgaaaggcagttgtatcatgtcttttacccattctaacggtagtaccaattcttgtggaatccaggctatttgtttgcgaataaggtctatgctgtttttatccgatacgatgtcattgaccgtaatacgtccttcttttaatggagtaaatcccagtatggcattgagaagagatgtttttccacaccccgacgagccggaaatgctggcaatctctcccctctccaattgcaggttgaagttggagaatagcacatcattaccgtatgcaatactggcatcctctatttgtagcataaataaattctttagtcgttagttgcaaaggtaaggaaaaaagatttgcatacataactttatacttttatctttgtgtcactaattaattcgggagaaaaagtatgatacagaacgaacgggattgccgccatgaacatgtgctgggcgtggcaaggcaaatgatgactgccgcacgcacagctcctaaagggaaaggtgtagatgtaatagaagcagcactggttacaggagaagacttgaaaaagctttcagaaaaaatgaatgctatggcagaagaactgggtatgaagttctttctgcgtgatgcggcaaatgtcctgcaggcagaatgtgtcgttataataggtacgcgcgagcaggcgcagggattgaactgcggtcattgtggctttcctacttgtgccgggcgtacggaaggtgtgccatgtgccttgaatacggttgatgtggggattgccgtcggctccgcttgtgccacggctgccgacatgcgggtagatacccgggtaatgttctctgccggactggccgcacagcgaatgaactggctgaaagattgcaagactgtattcgccattccggtcagtgcctcttccaagaacccgttctttgacaggaagcctaaggaagaaaagaaataaagcgcattgccgaatctgaagttgagaacgggaaacgtaaagttgaactttagcggcgtagagttgaacttcagaactctaaagtggcactttagaaatgcagaatagaactttgcgtaaattaagattagggagcatcggtattcaggcttcattatcttacttggcgaattaaataacttagaattgatatgggatattttgttggaattccattgggcggagctgccgaaaaggactgtcaggtgcgtttcggtaagaacatgacctttcaagtggaaacgcgcgctcctcacctgccggcggagtgggcattgcagagtggcgtacagcttacatggcctcatgcggatacggattgggcctatatgcttgaagaagtgcagcaatgttttattgccattgcttccgagatagccaagcgggagttgctgttgattgtaactccggaacctgaagaagtaagaaagcaaatttccgtgacagtggatatggataatgttcgtttcctgaaatgtgaaacgaatgatacctgggcacgcgaccatggagctgtcactatgatagatacggaagggccgtctctgcttgattttacttttaatggctggggactgaagtttgcttcggataaagataatcaaattacacgtcgggctgttgaagctgaaatcttaaaaggccgatatataaaccgtttgggctttgtgctggaaggcggttccattgagagtgacggcatgggaacattgcttaccacttcggaatgcctgttgtcgcctaaccgtaacggccagttgaataaggtggagattgaggagtatcttcggtctacattccatcttgaacgggtactttggctggattacggttatctggccggagatgatacggacagtcatatagatacgcttgcccgtttttgttcgccggatacgattgcctatgtgcagtgcagggacgtgaatgacgagcattatgaggagctgcaccgaatggaagaacagcttaaaacgttccggacacttgccggagaaccttatagactgttggcattgccgatggccgataagatagaagcggagggcgaaaggctgccggctacgtatgccaactttctgataatgaatgatgcagtgttatatcccacatataaccagccggagaatgatatgcatgccaaagaggtgttgcaaatggcttttcccaagcatgaaattgtaggtgtagactgccgtgctttgataaaacaacatggctcgctgcattgtgtcacgatgcaatatccgataggagtaatcagataatagaaaggtatgaaagttatcaatttcgttttttgtgggatatttgtagccatgtatatagcaggttggctctttcctaagtttcggcggtatattaaaaagaatatatggttggataacttaccgggagtgttggagcttatcttctttataaatctctccgaatatctttttgttgagcaatggaattgggaatatggcgaggttctttcctggcttgctcctgttcttatcgttttggtaacttcttattggtgggatagattagatcggaaaaataaaaaacatttaaaagaaatatagattatgagaaaaataaaagtcggtattattcagcaggccaatgtggcggatatgcgcattaatctgatgaatctggccaagagtatcgaatcgtgtgctgctcatggtgcacaattagtggtgttgcaggagttgcataactcactctatttttgccagacggagaatacacaactgtttgatttggcggaacctattcccggaccatcgaccggtttctattcggagttggcggctgccaacaacatagtattggtaacttcattgtttgaaaagcgtgctccgggactgtatcataatacggccgttgtgtttgagcgtgacggtagcattgccgggaaataccgcaagatgcacatccctgatgatccggcctattatgagaagttttatttcactcccggagatttgggcttcgaacctatccaaacgtctttgggaaaattgggcgttttggtttgttgggaccagtggtatcccgaagcagcacgtctcatggcgctgaaaggagctgaattattgatttatcctaccgccatcggttgggaaagcagcgatactgatgatgagaaagtccgtcaactcaacgcatggataatctcgcaacgcggacatgccgtagcaaacggacttccggttatttcggtaaatcgtgtgggacacgagccagatccctctatgcaaacaaatggcatccaattttgggggaacagttttgtagttggaccgcaaggtgagtttttggcacaggcaggcaatgagcagccggaaaatattatagtggaagtggatttggaacgttcggagaatgtccgccgttggtggccattcctgcgcgatcgcagaattgacgcctatgagggattgacaaaacgttttttagactgagggtttgtttgatttctataagaaaagaattctcaaaagcatgctgaataaaaataaggcaagttccgaagaaaggagcgcttctatttaaatgtaacttttttgttcatcaggaagttgactccaccatatacaaataatcctaagaactgggcgaggtattcattacagttcaatccctctaccaagccgatgaggaaaaggaattgcgcacaataagccattccgaaagctatggaaaagagcaacacttgccgccaagtgttgctcttcttttctgttgggaatacccaatacttgcaccagataaagttatgagtctgtgccagtatatatgcagtgacattggagagcatgtaattaatgtccaactcatccatcattacccagatggtgattgctgttatcaaggcgtttaatgtaccgattactgcaaaacggcaaatacgtgtggactctttcactctctcctattctcttgtttttattcttttacctccacaataaggttaagctcgtccaattgtttttggtcgataaccgaaggtgcatccagcataacatcgcgaccggaattattcttcgggaacgcaatgcagtcgcgaatactgtcaaggccggcaaagatacttacccaacggtcgaggccgtaagccaaaccaccatgaggaggtgcgccgaacttgaaggcattcatcaggaaaccgaattgttcttcagccttttccggtgtgaatcccaatatctcaaacattttggcctgcaattgagcgtcatggatacggatcgaaccgccaccgacttcgataccgttacataccatatcataagcatcggcacgaacggctgcaggatctgtgtccaacaaaggaatatcttcatccttcggatgggtaaacggatgatgcatagccatcaggcggccttcttcttcgctccattcaaacatcgggaagtcaactatccaaagcaatgcaaacttattcttgtcgcgtaagcctaattggttacccatttcaaggcgaagctcattcagttgcttacgggtcttcattacgtcatcaccgctcaaaataagaatcaaatcgcccggttttgcaccgaaagcggctttcatctcttgcagcacctcttgcgtgtagaatttatcgacacttgatttcacagtgccgtcagcttctacacgggcatataccattcctttggctccgatttgcggtttctttacgaattcggtcaaggcatccagttgcttgcgggtgtagcttgcagcgctttccgcacagataccgccgatgtatgcggcattgtcgaatacagagaaaccatgacctttcataatatccatcaactctacgaacttcatgccgaagcgcaaatcaggtttgtcgctaccgtaatatttcatagcatctgcccatggcatacgttggaacggttcggtcaactcaacaccgcgcagttctttgaagaggtattttgccataccttcgaaaagttcgattacatcgtcctgctgtacgaaagacatttcacagtcgatctgtgtaaattccggttgacggtcggcacggaggtcctcatcgcggaagcattttgcgatttggaagtaacggtcaaaacccgaaaccatcagcaactgtttcaatgtttgagggctttgcggcaatgcgtagaattgtcccggattcatgcgtgaaggaacgacaaagtcgcgtgcaccttccggtgtagaaccgatgagaagaggagtctctacttcaatgaatcctttgctgtccaggtatttacgcacttcaatagtcatcttatggcgtaattccaaattcttgcgtactgctgcacggcgtaaatccagataacggtatttcatacggatatcgtcaccgccgtctgtattgtcttcaattgtaaaaggaggagttaaggctgaattcagcacattcaattccgatacgatgatttcgatatctcccgtaggaatatttttgtttttgctgaaacgttcgttgaccgttcctactatttgaattacgaactcacgacccaagcggttggcctgttcgcaaagttcggcatctacttcttcattaaacactaattgggtgattccgtaacggtcgcggaggtctacgaatgtcatgccgcccattttacggctgcgctgtacccaacctgccagcgtcacttgcttattaacgtcggagatacgcaattctccacaggtgtgtgatctatacatcttattatttactattttacaatttactgtttactgtttggcgatgcaacatcagagatgtaccattgctaaaaacggataaatatcgtgcaaaaatacataaaacatattacagacgtatcaaaacagataagtttatttttaaaaagcgactttatataatagccggacagaaaaataccaatcttccatactgttccggctctcttgcagaaggcgttagttctttctaagttttttaatctgttctttgcctttatccaatatcattctgtttgtatgggtaatatcttccaggatggcttcgtttatttgtttcaagccattgatgtagtcctgggcacgctgcaatacattcgaagagtctttttccacattcttgggcacaatgacctgcaatcctcttttgattatgtttacgtcgatgttctctcccattatcatcggatctccatcgaaatgtataaccccctgtttggaacgatggatgcggagcgtcttacagcggaaagtctttatacggctattctggtcgatagtcttgttgaacaactggaatgataatgccggtacatccaatacggtaaaaggctccagaattgtaacgtccagcaatccgtcatttaatgtggcttgcggagtgatataagcattattcccatactgtgaggcattgccgcatgctatcaggaaagccttgtatcgcagtgtgctgccatccatttccaattcgtatgtctccggtttatattttaggctttcaagcaatgtcttctccagatatatgagcgggcctctcttgccggctttggaaaactgcaggctgacaaatgcgtcgaaccctaccccgcaggtacagaagaaaggaacatcattgattttgccatagtcaataatgtctatcaatccttcgttaatgatgttgattgcttttttggcatccatagggatttgcagatggcgtgcaagcccgtttcccgaaccgcatggaatgattcccaatgcagttttggtatgtaccagtgaacgtgctatttcattaatagttccgtctccgccgatagcaacaacggcaaaagcttcttctttagcttttagggcggctatttcaactgcgtgccccgcccgttccgtatagattacttccggtatataccggcttttatccaacttttcatcaagccatttcaatatttgctccttaccctgagtaccggatatggggtttattataaatgatattttctttttactatcgtccatttaaacggatattactataggaaatttcttcatgcaaaagtaatataaatcctttaaattttaaccatatgaatctcttaaaacgagttagggcagattttttagagtaaatgaaacagataacaacatattttgctatctttgccccctgtttttaagaacttgtttttaataggattaatattcattatataaaagacatttcatgggtttactgcaagacaaattcgcgaaatatgatttgccgcaacaatttatggcaaaaggggtatacccgtatttccgcacgattaacagccatcaggatacagaggtaatgatggatggcaaaaaagttctgatgttcggttcaaacgcatatatgggactgacatatgacaagcgaatcattgacgcttcgatagctgccactgaaaaatatggtacagggtgtgccggttcccgctttttgaatggtactcttgatatacatgttgaactggaaaaagagttggccgagttcgtaggaaaagacgaagcgctctgtttttctaccggttttactgtgaacgagggcattattcccgcagtggtaggacgtggtgactatatcatctgcgatgaccgcgaccacgcttctattgtagacggacgccgcctttcgttcgccacacagttaaagtataagcacaatgacatggaagaccttgaaaaagagcttcagaagtgcgaaccggatgcggtgaaactgattattgtagatggtgtattctcaatggaaggcgatttggccaacctgccggaaatcgttcgtctgaaaaagaaatataatgccagcatttatgtggatgaagctcacggattaggtgtattcggtaagcaaggccgcggtgtatgcgatcatttcggagtgaccgaagatattgacttgataatgggaacattcagtaagtcattggcttctatcggtggttttattgcaggcgacaaggaggttatcaactggttgcgccacaatgcccgctcttatatattccaggcaagtagtacgccggcggcgacggcagcggctcgtgaagcactgcacattattaaatccgaaccggaacgtatccaacgtctgtgggatatcactaactatgcattgaagagtttccgtgatgcaggttttgagattggtgaaacagagtcgcccattatacctttgtatgtgcgtgatacggaaaagacctttgtcgtaacgaagatggcttttgatgaaggcatctttatcaatccggttataccgcctgcatgcgctcctcaggatacattggtacgtgtggcattaatggctacccatactaaagaacaagtggattatgcagttgagaagttgacaaaatgctttagggaattggggataatcaagtaaaggaacaatttgaagtaaagataaaagccgtttaatcgtgaatcggttaaacggctttctttttataaacccatttaaactaaccaaacaacatgaaaaaacaaattctgatttttactgctgttgtatgtggaatgacttgtactacaactgcttatgcgcaatttaaaattggtggtaagaaaatcaatgtaggtaaggttgttcaagccggtacggatgctgctaaagctataactctttcggatgctgatattgcagctatgagtagggagtatatgcaatggatggatactcacaatcctttgacgaagcctgatacggaatatggcaagcgtctggagaaactgaccggacatatcaaagaagtggatggtttgaaagtgaattttggggtttatgaagtggttgacgtaaacgcttttgcctgcggtgacggcagcgtacgtatttgcgccggattaatggatattatgacggatgatgaagtaatggctgtagtaggtcatgagataggtcacgtaattcatacggactccaaagatgccatgaagagcgcatatcttcgttctgccgtgaagaatgctgcgggtgctgcgagttctaccgtgtcaaagctgaccgactccgagttgggagctatggcggaagccttggctggtgcgcaatattcgcagaagcaggaaacggaagcggacgattacggctttgaattttctataaagcataatttggatccttatgccatgtataatgcattgaataaactgctggaactttcagcggacgctcccaaagaatctaagttccaaaagatgttttcatctcatccggatacggcaaaacgagtagcccgtgccaaggagaaagctgatgaatatatgaaaaacaagcaataagaggttgcatttccaaattacagaaagaggcgggattccatttgaattcagcctcttttctttataataaaagaataaaacgtacttttgcttcaaattattgactttacttatccgattgctttgatattggttttattttagtatgtttgctgttattattaatgaaaagcataacatttgaatgaaaaagcaagatttccttttcgttttcatcctaatcgtaatcttcttaccttttttcgtgagtgatgcagtttacggctggtataagtctttcaatgccgcacatggtatggtaatgagtttcttgaaattcggagtgcttgctactttaggtgagatgctggggcttcgcatcagtgccggagtatataacagaaaaggatttggagtgctttcccgtgcggtcgtatggggtatcttaggcatgggaatcaatatggcgatgattgtattttctaaaggtgtgccgcagttcatggagtatatggggatggcggatgcttcggcgataattaacggcgattgctgtttggacaagttatggattgctttggctgtatctgttaccatgaacacaatctttgctcctgtatttatgacatttcataagataacggatacacacattctggattgtggcggttcgctccgcagccttattacccctattccgatggcacgtatcattacgcatcttaattgggatacgcaatggaattttgtttttaagaaaacgattccttttttctggtatccggctcataccattactttcttgttgccggatgaggtaagagttttgtttgccgctatcttgggcgttgcgctcggggtactgctggctattgctgcaaggatgaaataatggttctctatttccataccgttgccaatgctttttactgtgagataaagttcatctccctgttactcccaatatttgtatgccagtgtagccatattaatggaagaggcatctccaccctcttccagtttgataccctgcatttttcccggttgcccttcgataggcattatccatgaaccaatgatagagtctttgcttttcttttcattacaaacagacattgcaataaccaatacggcggttgccaataaaagtctttttatactatatatttttaaaagtgagtcaatgtattttcgttatggcagatgcaatattaatgccgggctcatcttcggtgaccgtgtatgaaacctctaatgtatctcctattaatagtcctttgtaaacccattcatggcagcatccatgactatgccttgtgcttgatgtacggaatcgttaatctcttctgtgccgagctcggcattttcttgttccatagttccggctttatttttgcaggaagcacatcccaacaagataatggaaacaaataaaaaaggtttagtcaacttcatattctctgatcttattaagattatttctacaaaaatagatataaaagagaatgtatcaaagagacagtgaataattaaccgttcctgtatattgtatttcagatatttataattttatttcagataaagttataaaaatatttggtctatatcaaaaaagattttacctttgcactcgcttttaagaagtaaagcactcggggtgtagcgcagtccggttagcgcacctgctttgggagcagggggtcgtgggttcgaatcccgctaccccgactgataagaatcaaggagttacagtaaaatgtagctccttttttgttgctcgaatggaggcggttgaattgacggcttaacgtagaaatcggggatcaacgtaacaatctgagggattttatggatcaacgtaacaatctgagggattttatatttaagcatataatttagcaagtctatataagaaaaaagctctatctcttactcctctgaactgtgctctaaatgctttgattttagcattgaatgactctgctgcggcattggttgccctcctttcaaagaaattgattatatccagataatgtgtttgtatagaacgtgcgacccttccaaaggtgaggaaccccgatttatctacttcatcataccaccttgccagccttgtcaaagcaatatccttaaacttacactgatgatagattaagcctaaccgcatagacagataatatcctttctttatatcgggatattccttgaaaagaatttcagcccgtattctttgagactgagtccataaggattccttcttgtaaagcagataaatacttctcgctaacaactgctttcttgtatctccattagcgaaaacaggtgcatgatacatctttccacaggcctttgcataagcaatctgagtggactcttcatccaaagcctcccagcgagcttttacacgcatctcctgcacagcttcataagctaacttctgtacgtgaaagcgatcggtaacacgtttggccgcaggaaagcagatgcgtgcaatctgctccatgttaggagccatatccaaggttatctcgcgcacttggtaacggcggcgacgggagagcttaagcagaacagaagtgaccgtatgaacgtccgtacctttaatgatggcaatcatactacctttaccaccgtgagcttctttattggtcagtacagtatagagttccccacgcgagagggctacctcatcaatacagatataagcaccgatattcttttcgaatagtagccaatcctctgcatgaacaagttggtcccaatggagataaccacttagatggttacggtattgacgctccaataaatccccgtcaactccatataaaacacctaagagcttgcaactgatcggatagctatcaatatagttcttttaaaaaagacgcaaaatcctgcgtcatacgagtaccttcagccaccatacgccagttacgggagatatactcattatgcttctttaagagccagcgacgacgacgaatattaaggaagaccttcttgccacgaagaggaaaatcctgaacaataacaggagcataaaagcctttactctcaatatcctgatctgtatacttctcaggaacgatatttttctcctcaaggtagaatacaacttcatttacactttctttcacatcaacaagatcaaagtagtctaaagtgccttcaggaagaagaaggcgataaccgtttaactccataagctatgaatttggagacaaagataacaatttataaatttacccctcaggtttttacattgaccctagaaatccgattcgactataattttcgtggttcaggggatgtttaaccctaaggggttcttgttgctatgtataaattatggcgggttacaataatccattagaccttatttcgcatttattactgcctttgactgcaaataataattcgtcagacatctgttgccctttcgttaaacaaccgtctaacgcaagagtaacagatgtctgacgcaagggcaataactgtttaacgaattaagaatagtagccggactatttgttggcaatacattttcctactatccatagagactttctttattctttatgagttatcaagaacattacatctttaaataaaagtctttggtcagcgcaatgtactccggggtaaattgttcgtgtttctctccttctatgtaaagactgtcctcaatacatgatatgctttgccggccgaaagtcagcaacacgcgccggcaaggttttccgggtttggtaaaaacatgcaaacggcgatgtggatgaaaattatatttccaggccgtatcaatcactgttctttcaacttcggccggaatgataatgcttataaccccctgttccgataataagtgcgccgaatgccccaaaagaagttcatagttcagctcactcgtgtgccgtgccatgcagcgctgattgtcaggacatctcagggcgtcaacaaaataaggcgggttggaaacaatcaggtcgaatttatcttccgggtgatacttgcggaagtcgcagcatacaacttccatccgattgctccagggggacgattgaatattctcttgggcttgtgccgccgctgccggatctatctcgacagaggtaattaccgcttctggattacgctgtgctaattgtaaggatattaagccactacccgctcctacatcaagaattcgtttaacatcttgaaccggagcccacgctcctaataacaccccgtctgtacctaccttcatggcgcatttgtcgtgtcggacggtaaattgtttgaactgaaaataaggattcggcatatttgtctttgttaatcggactcaaaaataatcaaagccgacaaaataacggcaattttggcatcgtttttgtctttttaaagaaaggacacccgtttatacagaagaaatagctaactttgcaagcgccttattggcctgccaatatgacataaactaaaaagaatgaaatgaagaaaagaaattactttagtgatatcgaagataggaatgaaaatgcattttctgtaattgctgattttgaggggaatgaagaacaattgatggatattgaggttgatgaaatccttccggtattgcctcttcggaacatggttttgtttccgggtgtgtttatgccggtatccgttggaagaaagtcttccttaaaattggtgcgtgaggcagaaaagaaaagttcatatatagctgtagtgtgtcagaaagccgctgatacggaggagcctgtacttgaggacttgcatacaatcggtacggttgccaagattgtccgtgtattggaaatgccggatcagacaacgactgttattctgcaaggttccaaacgcattgagttgaaagaaataatggaagtggctccttatttgaaagggcgtgtaactaccctcaatgaagagatacctgctaaagatgacaaggaatttcaggcattggtagaagcatgtaaggatttgaccgtgcgttacataaaatcctcggaaatgtttccgcaagactctgcattcgccatcaaaaacattaataacccgatgtttttggtagattttatctgcaccaatctgcccttgaagaaggatgaaaagatagagttgctgcgtattgacgcattgcgtgcccgcacttatcgtttgcttgagattttgaatcgggaagtgcagcttgccgagattaaggagtctatccaaatgcgcgcccgcgaggatatagaccagcaacagcgcgaatatttcctgcaacagcagattaaaaccattcaggatgaattgggtggtggcagtcaggagcaggaactggaagaaatgcgcaaaaaagctgaaaccataaaatggaatgaagaagtaaaaagtacattcctgaaagaagtggataagttggagcgcatgcatccgcaatcgcccgattacagtgtgcaactgaactacttgcagactatgatgagtttgccgtggggcgtttatacaacggataatctgaacctgactaatgcagagaagacgttgaataaagaccattacggcttggagaaggtaaaagagcgtatattggagcaccttgccgtattgaagctgaaaggagatatgaagtcgcctatcatctgtctgtatggtcctccgggtgtgggtaagacctctttggggcgctctatagcggctgctttgaagcggaagtatatccgtatgtccttgggtggcgtacatgatgaagcggaagtacgcggacatcgcaagacgtatatcggagcaatgcccggacgtattatcaagagtctgattaaagccggttcttccaatcccgtatttatattggacgagatagacaaggtgagtgccgaccgtcagggcgacccttcttccgctctgctcgaagtgctcgatccggaacagaatactacgttccacgacaacttcctggatgtggattatgacttgtcgaaggtgatgttcattgctaccgccaataatctgaacacaattccggggccgttgctcgaccgtatggagttgattgaagtaagcggctacataaccgaagaaaagatagaaattgcccgtcgccacttggttccgaaagagctggaagcaaacggtatgaagaagagcgatatcaagattccaaagaatacgttggaagcaatcatcgagtcttatacccgtgaaagcggtgtacgtgaattggaaaagaagattggaaaaattcttcgcaaatcggctcgccaatatgccacggacggctatttcgcaaaaacagaaatcaagccgggcgatttgtacgaattcctgggtactcccgaatatacacgcgacaaatatcaaggcaatgaatatgccggtgtagttacgggcttggcatggactgctgtcggcggtgagattctgtttgtcgaaaccagtctcagccgcggtaaaggcggacgcttgacactgaccggaaacctgggtgatgtaatgaaagaatcggctatgctggcattggagtatatcaagtctcatgcttcgctgctgaatcttgatgaagagattttcgacaattggaatatccatgttcatgttcccgaaggagctatccccaaagatggcccgtcggcaggtataacaatggctacttcgctggcatctgcacttacgcagagaaaagtaaaggccaatcttgccatgacaggcgaaatcacgctgcgcggaaaagttcttcccgtaggtggtatcaaggaaaagattctggctgccaaacgtgccggtatcaaggagattatcctcagcgacgagaatcgtaagaacattgaagagatacaggaaatttatctgaaaggactgactttccactatgtgaaagacgtaaaagaagtgtttgccattgcgctgactgatgaaaaggtagctgatgccattgacttgtccgttaaaaaagaaaagatagaaaagtaagaagaatgacatttgagttacagtatacagacagcaagacaaatgcccgtgcaggtttgattaccaccgaccacggacagattgaaacgcctatctttatgccggtaggtacgttgggaaccgtaaaaggcgtgcatttgacagagttgaaagaagatataaaggcgcagataatattaggtaatacctatcatctttatttgcgtcccggattggatgttattgaaaaagccggcggattgcacaagttcaacggcttcgaccgtccgatgctgaccgatagcggcggttttcaggtcttttccttggcaggtatccgcaagttgcgtgaagaaggtgctgagttccgttcgcacatcgacggaagcaaacacattttcactccggaaagagtaatggacattgaacgtaccatcggggcagacatcatgatggcttttgacgagtgtactccgggcgatgcagagtatgcctatgccaagaagtccatggaaatgacgcatcgttggctggaccgttgtatcacgcggttcaatgaaacggaacccaaatacggctatcatcaggctcttttccctatcgtgcaggggtgtgtttatcccgaccttcgcaagcgctcggccgagttcatagcctccaaaggagccgagggcaatgccatcggcggtttggctgtgggcgaacctacggagaagatgtacgaaatgatagagctggtgaatgagatactgccgaaggacaagcctcgttatctgatgggtgtaggtacacctgtgaacattctggaaggtatcgaacgcggagttgacatgttcgactgtgtaatgcctacacgtaacggacgcaacggtatgctgtttacaaaagacggtatcatcaacatgcgtaacaagaaatgggaaaccgacttctctcctattgaggcagacggtgcatcttacgtagatacattatatagtaaggcctatctgcgccacctcttccatgcacaggagttgctggccatgcagattgcttccattcacaatctggcattttacctttggcttgccggtgaagcccgcaagcatattattgccggtgatttctctacatggaaaccgatgatggtacaacgtgtatcgacaagattatgagaaagattgactggaagatgctgaaagacatcaagctgcctgtcgggaaaaataagttcctcaagcggttggactggtacatcatcaagaagttcctgggaacatacgtgtttgccatagccctgattatttctatcgccgtagtattcgactttaatgaaaaaatggaccgcttcatgtctcatgaagcgccatggcaagccattatcttcgattactacatgaacttcatcccctactttgccaatctgttcagtccgctgtttgtcttcatcgcagtaatcttctttacttccaaacttgcggagaactcggagattatcgcaatgttctctacgggaatgagttttaagcgcatgctgcgtccttatatggtgtcggcggctattatcgcaatcactacgttctgtctcggttcgtatgtcattcctaaaggcagtgttacgcgacttaattttgaggacaaatactataagccccgcaagtccaccacagcccgcaatattcagttggaggtcgattcgggagtcattgcctatatagagcgctttgaggattacagcaaaacgggttaccgcttttcgctcgataagttcaaggacaagcagttagtgtcccatcttaccgcacgcagcattacttacgatacggcagccgttcacaaatggaaggtgaaggactacatgatccgtgaaatggacggtatgcgcgaaagcatcgttaaaggagagcggctggataccattctctttatggaacctgccgacttcctcataatgaaaaaccagcaggaaatgctcaccagccctcagttgagcgagtacatagaccggcaacggcaacgcggttttgccaatatcaaggagttcgagatagaatatcataaacgcatagccatgtcttttgcctcgtttatcctgacgctgattggcgtatctctttcttcgaaaaagacaaaaggcggcatgggattgcacttgggcataggtttgggattaagtttctcgtatatcctgttccagacgattgcctctacatttgcagtgaatggtaatgtgccgcccgtcatagcggtatggataccgaacctgctttatgcattcatagcattctatttgtataagaaagcgccgaagtaagcaactgtagaaagctgttgtcaaagcataccgcagaatagtgtaaaaaataagaagccgtcccgctcttgtgtttccacaagtgcgggacggcttttttgttgtattcatttcctcttttgttttgttcttctttcttttcaggcggatagaccgcctttgtcggaagaatccccactttcttcttacaggttctttaatcccttcattgccatgctgtgcattgaagcgcttaattcaagtaagccgaaagctctgcagcagagatgtttttggcaataatcacaccattttcatccagtaaatagttagtaaatccgcgacctaagcgatatttcttgaataagccggaggactcgcctttagtttccacgaaacaggtgggcgtaactatttggtccttacgaacggtttccttaaagatagactgatactcatcgaatgagacggaaaccatttctacattttcattgcgggaagcggaacgaagcacattgctcaaactcgcgttttgcatccgggagtgcgcgtcataacttgcccaaaagctaagcaacacatatttgcctttcatgtccgaaagttcggctaacggttgcccggcagacatagattggattttgaagtccggggctatgtcacccacattcaaaccgccggtcggtttgtctttttctacaaaagaagtcaaggaaccaattagtaatacaacaaaaatccattttacatatttcatgtaacacgattttggttaatactatccgggactgtcctttttggcagtgatttcttcccggaatgtcatcttctcagaccttgcaatgagaggaattcattgatactcaaagcctttaattctgaaatcgggtgcaaaggtaagtaattcttaaagaaacttccaaataaacaagcgattttctcactttttcagtgcaactttttatgttatttagcataaaaggcgggatttttccttacttttgtggcttgttatcctattaatagacaacttatgaaaccattaagtacagaacttatcctgatccgcgtaacaggtgaagaccgtccgggactgacggcttcggttacaaaaattcttgccaagtacgatgcaactatccttgacatcggacaagccgacatccataacaccctgtcgttaggtattttatgtaagacggaagaacaacattccggctttatcatgaaagagctgcttttcaaggcatcgtccttgggtgtcaccatccgtttctaccctattacagcaaaagaatatgaggactgggtgagcatgcagggcaagaaccgttacattctcacgttgctcggacgtaagttgtctgcccgtcagatttcggcggtgacccgtattctggcagagcaaggaatgaacattgatgccatcaaacgtcttacagggcgtattccgttggacgaatgcgatacaaagacgcgtgcctgcattgaattttccgtacgaggcacccctaaagaccgtatcggcatgcaagaagaactgatgcggctggccagtgagctggaaatggatttctctttccaactggataatatgtatcgccgtatgcgccgccttatctgttttgacatggactccacactgatagagaccgaagttatcgacgaactggccattcgtgcaggtgtcggcgagcaggtaaaggctatcacggaacgtgccatgcggggagaaatagactttacggagagctttcgtgagcgggtggcattattaaaaggattggatgaatctgtcatgcaggagattgccgagaacctgcctattacggagggggtcgaccgactgatgtatgttctgaagaaatatggttataaaatagctattctttcaggtggtttcacttacttcggacattatctccagcagaaatacggcattgactatgtatatgccaatgaactggaaatagagaatggcaaactgaccggacgttatctcggcgatgtggtggacggcaaacgcaaagcggaactgttgcgtctgatagcgcaggttgagaaagtggatatagcacagaccattgcagtaggtgacggagccaatgacttgccgatgctggggatagccggattgggcattgcttttcatgccaagcctaaagttgtggcaaatgccaagcagtccattaataccatcggcttggacggagtgctttatttcttgggattcaaggattcctatatagatattccgcggtaaaataagtccgtacgataaaattcacaggctcctgcgataattaattatcataggagcctgttttttaagcgggcttattttgttctgcccccggtttgcattatctttgcagcaaatataaagaaatacatgaagttttctgaactaaatttaaatgacaatgtgcttgaagcactggacgcaatgcgctttgacgagtgcactccgatacaagaaaaatcaatacctgttatactcgaaggtcgggatttgatagctgttgcacaaaccgggaccggaaaaacagctgcctatctgttacctatattgaacaagctttcggaaggcgggcatcccgaagattccatcaactgtatagtaatggcccctacacgggaactggctcagcagatagaccagcagatggaaggtttctcctatttcatgccggtgagcagcgtggccgtgtacggcggtaatgacggagtgcttttcgagcagcaaaaaagaggactgactttgggagcggatgttgtaatcgctactccgggacgtctgatagctcatctcagtctgggatatgtagacctttcacgcgtctcctatttcattttggatgaagcagaccgtatgctcgatatgggattttatgatgacattatgcagattgtgaaattcctgcctaaggagcgtcagaccattatgttttcggctacgatgcctgccaagatacaacagttggcgcaaaacattctgcataatccggcagaagtgaaacttgccgtttccaaacctgccgagaaaatcgtacaggctgcctatatatgctatgagaaccagaaattgggtatcatccgcagtcttttcgctgagcagacccccgaacgtgtcattatcttcgcttcttccaggttgaaggtgaaagaggtggccaaagccctgaagcaaatgaagctgaacgttggggaaatgcactccgaccttgagcaggcgcagcgtgaggaagtaatgtacgagttcaaggcgggacgaatcaatattctggttgccaccgatattgtggcgcgcggtatcgatatagatgacatccgtctggttatcaattatgatgtgccgcatgacagtgaagattacgtgcaccgcatcggacgtacggcacgtgccaacaatgacggtgtagcccttactttcgtcaatgaaaaggaacagacgaatttcaagagcatagagaatttcctggaaaaagaaatctataagatacctgtgccggaagagttgggtgaagctcccgaatacaagccgcgctccaatgacggacgcaaacgcagcagctttaaaggcggcggacgccggaacaacggaaccggcaaaggcggcaacagaaataataacaaacgcagggacggcagcaaaaagcccactcaggcaaagaagcaggaataataaaaaaagcggaatttattccgctttttttatgtccatccgattatcgaatccgatggtaatatctgccagactatatacggagctttccggcacgcgtaaggttgcctgatattggtagcctttattatcaactcccataaaattcatatcggcaagaatcatctggctcagaatatcttcgggaaagatgccggcaaatgccttcttggtaatgtctttgccatacaacattcgtctgccctcatacacgcaaatatgtatgacattgtcataatagacattgtccacgctgatgccaccctctgaataggatgagcggacgactttcattgtcgaagggttgacgtacacatatccccggtagcgtgtgcctttgtacatcactacgctgtcctttttcaccacttccgtggtgggtatgacttccacttccttgttttcaaaggcgagtatatcctccggattttccgatttatgcagttttataatttcatctgccaatgaatgaaaccagaagctgtattctgtctgtcggtcaattttgtaagtcacggtatgattgccgtacacatacatcgtatctcgtataatcttgaatgatacggggatattctgaggatcggcatagtatatggtatctccttctatacgcatcaggggcagttcggtttcatcatttatccagacaccttgaagcagagccttggccgtagcgtcttcttcgagtgttttttgctctttaccattaccgcatgcagccaacgctatgacgcagcacaactctattacgagttttttcatgtctatctccttcctttatttacctatacagtggtaggtaaatccaagttcttctatttctttcttttcgtagatattacgaccgtccagtaacaccggggttctcatggcttttttgataacggcccatgacggcaggcggaattctttccattccgtcaccagcatcaaggcatccgcatcgagtgcggcatcgtacatatcggtggcatagcagacgctgtcgcctatcctgcggcggcactccgtcatggcagccggatcgtacacacgcactttacaaccggcattcagcaacttgtcaatcagaatcagcgaaggcgcctcgcgcatgtcgtctgtttccggcttgaaagccaacccccacaaggcaattgtcttatcgcgcaaatcgccgttgaagtggcgttgcagtttttcaaacaagatgcttttctgcttttcattgacttcctctacagcctggagcacacgcatccggtaaccgttctgttcggcggtcttgatcaatgcctttacgtctttcgggaagcacgaaccgccatatccgatgcccggatagaggaacttacggccgatacgcgtatcggaaccgatgccgctgcgtaccatattgacgtcggctcccaccagctcgcataggttggcgatgtcgttcatgaagctgatgcgggtggcaagcatggagttggctgcgtatttggtcatttcggcagacggaatatccatgaagataacgcggaagttgttcagcagaaacggtttgtagagtttgctcatcagtttctttgcacgttcggactccactcccaccactacccggtcggggctcatgaagtctgctaccgcattgccttctttcaggaattcgggattggaagctacatcgaagtctatctgtactccccgcttatccaattcgttctggatagccatgcgcacctttccggcggtgcctacgggcacggtacttttggttaccaccaatacatatttcgtcatgttacgcccgatggtacgcgccacttcaagcacataactcaggtctgcactgccatcctcgtcgggcggagtacccacggcgctgaatataacatccacttcgttcaggcaactttccagagaagtcgtgaattgcaggcgccctgctttcgcgttccggtttaccatttcctccaatccgttttcatagattgggataataccctgcttcaatgcttctatcttttcgctgtttgtgtcgacgcaaatgacattgacacctatttcagcaaaacaagtaccggttaccaaaccgacgtaccccgtaccgacaatggctatcttcatatcttattcaaaatattccgcatctttgaaagatacggcatgtccgtctttctccgataatatgaactgagattccgcaaccggccagtcgatgcctatggtttcatcattgaagcgaatcgacgcttcggcctgcggagcataaccgttatctactttgtaggtaaagattgcctcttcgctcagtaccagaaagccatgggcaaatccgcggggaataaagaactgacgcttgttctcttcgctcagttccacgctgacgtacttgccgaacgtaggagaagaacggcgtaaatcgaccgcaacatccaaaactttaccttttatgacacgtaccagcttcgcctggctgtattcgcctttctgataatgcaacccgcgcagtacgccgaaagaggattttgattcgttgtcctgtacgaaatgtacatcgccgatattggcacggaattcttcttccttaaaggcctccatgaagtagccgcgtgcatcattgaacactttcggttcgatgatccatacgccgtcaatttctgtctgtatgtagttcattgctttagaatgttttatgtattttcatttgaaatccgaagttgtctccgtatatatctcccatgtccaaagcgagagaggcgttgaagttccagcctttccatctttcgggagaataagagaacgaggcataggccgaaaagttctccagaatatccagtgtgggagcaccgggagtaccccatgttctgttgtggctcattttggctatgtagctccattcggaagttatttgtccgctccagccgatgtgcagcgcttttatgcggttgtacttgaacgtcatgtcaccgtcctggttatagataggcgaagcaatcaacggattggctatcatcatgccccaatgcgcccagccggggtaaagaccgttgttgtaatagttgtcggaaccgccggtcttgtgtacgggaccttcttctggttcgtgcaagccgtgcagcggaccgctcatattggtggtctgcaggaactcgaacacaaccgcattgacgggcttgaaattgttgaagttcatttcaagtccccacaatccgtcccaaccgttctgcttgcccatggcggagaagtcgtcgaaatgattgcacaggtatgcgctgatagagaatttatcggaacggtgggtcagctttatctgttcgctgcccaggaagttgccctgatagaaattgctgtcgttccagggtttgtcttcactgccggagccggggataaatactctgaaataatctttcagcgtgttgcccagatttaccgtgctgccgtccgcattcaccagtgttccgccgaattgcgtatcgagcgtcatgccgatgtcgagctgccatttcccgttgggcacaccgacgcggacaaatccttctttatgatgatatttgatgtctttcgtgtaccaatgccctgctcctaccttccgttcctgatatttgttatcggtgaaccatccgtaagagatttcacctttaatggcgaaacgcggaaggacatacaagtattcggggatgcctatcattatttgcggaatcggcctcgcgttgcccgaccatgtcatgtcaccgctactcaaagcgttattcagcaatggagcacctttctcgcggcttccggcaaaaattcctagccacttgtaacgtgcatctatataggcctgctggataaaaatatccttgtcgcccttgaagttcatgcccacggcagctaccatgtccagtttttcttcgaacttccacttgccgagccggtgtttgtagcccagtccgccccgtatatacgtattgtcgtaaatagagccgagtccctgttggttgctcacttgccacagaggagtattgtcgcccgtgtgcacggtggctccgtattccacaaaaggcgaaacctgtgccgttgccataccgctacctgcaagaataatggccaacaaacagataggaatacgcattacggcaaatagtctgtatttggttaagtgctgacagttatctgtgttcattatcgaatatataatatagtttatagtcctaattaaagagaaacgtagaaaacggtgcaaaagtaggaaaaaaatctaatatatcggtcatgggcgataaaggagtttccaaagtttgccgtgtttataaattcttagtaagaaaagcagcccgaaagtggcatatatccgataaaaccgctacttttgtagcatgattgaattagcacagcacatagaagcattattattggagaatgattgtgtcattgttccggggttgggcggatttgtcgctcactacactccggcaatgagagtggcggaagaaaatacgtttttgccccctacccgcatcatcggcttcaatccgcaactgaagatgaacgacgggctgttggtacaatcctacatggctgtgtatgatacggatttttccgatgccaccaggattgtaggcaaatcggtgaaagaactgctggctcttcttcatgagaatggaaaagcggatttgcccaatatcggcgaattgcgctataacattcatgattcctacgatttcacaccttacgatgataagcttaccactccttacttatacgggcttggcagttttgaaatgcaggaactggcagtcttgcacaagccctgccggaacggaagcaagactattcctttcgcaccggttgtccgggaagaaaagaagcgtaagtatgggatgcgaatcaacacttcttatctggcgaatgccgttgccatgattgccgttgcggctctgttcttttttcttcccgcacccgtagaaaacaccgaagtgatggaagccaactatgcgcggctgctgcccggtgatttgttcgggcagatagaaaagcagtcattggccatcactccgattgtcatccatcagcaggagacgggtaagaaggcgaaaaccacccgtagcgccggcaagaaaccggttgctcccgttgccgtaaaagaagtaaaagtccgtcagcagactgcaacaattgcggctcagcctaaagcagcgcccacagttgccgctcctgccgttcaagccgtaaagacaccttatcatattatcatagccagcgtgggttctgaaaaagacgccgacaccatggcacagcagttggttgccaaaggttatgcaggagctaaagcgattatcggcgacggcaagatgcgcgtcagcattcagtcctgtgccacggaaaaagaggcataccgcgccttgaacctgattcgccagaatgaagcatacaagagtgcctgggttctgaaaagataattttcttcacagtcaattattaaccatcaactattccgacaattcaatgaaacgtatccgttgccccaaatgtgagaactatctgactttcgacgaaacaaaatatacggaaggccagtccctggtatttgtctgcgagaactgtaagaagcagttcagcatacgtttgggcaagacaaagatgaaagctccgcagaaagaggagaatccggacgaaaccgaatacaaggaagccttcggaagcattacggtcattgagaatgttttcggattcaagcaagtgctgccgctacaggagggagacaataaaatcggccgccgctgcgtagggacggttgtcaatgtcccgatagaaacctcggacatgagcatggaccgtacgcactgcattatcaatgtgaagcgcaacaagcaaggcaaccttatctataccctgcgcgacgcccccagcctgacgggcactttcctgaacaatgaaattctgggtgacaaagaccgtatccgcattgaagacggagccattgtaaccatcggcgccaccacttttattcttcgggcggcggagtaaagagattgcctttccggtttatccaccaatagcgtataaacaatactccggtgaagatgagcgcaagcgacagcccggtatagaacaccgaaataaatgcgtccggcaatatatggaacgagcgcatcgtgacgccgaacgttatcatgaagaccattacaatccagccttttacgtcaaagaaagaaaaagggcagttcttctctttcttcttttctccgatacgtttggtgtgcttgtaataaagccttttgaaaacaaacaaaaagaagagaaggaacacgactgtggcctctcctatcttgaaaagccagtattgggaatctgtcagccatgtcattattcctatcctgaagatattggccccggctataatccataccactccggcggttataagcaatacttttctgtttactccgtatttcatgtttccgttttgtataatcctgctgatacagggaacaaagatagtgaaaatatgttcgtaaattcatattgtgtaccttgctggcggtcagttgtatgcatgtaccaataaatttctttgcttggtactgtccataccacagtttggtacgagaagtaccttactaaggtacggcgcgtaccactgcgtggtacaagagctaccaacggttggtattccctgtaccacctgccggtagttgaggtatcctgtggtggaatgccggctaccctgcggtggaataccgacagtgtgcttaccagtcgtattcctcggtgtaccgatcgaactgtatctcctctttccagccatgcttccggcatacctggcggatgcactcctgctgcttcggagtaagtcccagcttctggttgcgataccggtaatagggcgaatggttgaatatggcttccagattgaggtgaatggcacgggagatgcgtgcgggcatatcatcgtaaagcttcttgaagccccatgccacccgtattttcttgttgctgcggaagtgcgggcactctttccctgccgccggatagcagagggggttgatgacggacagccggatgttttgcgccgtggtgtattgtgtcatactgtgccgcaggcagttttcggctttcgggcatcgggtgttgaagcacaatgtgtattgggctgcttgattgtttaagtcggagttgttttccattagttatcagaattttgatgaatatcgctttatccggtaaagatacgcgaaaaaatccggccggcaccatataacggctgttttattgggtaggtcgggcataaaaaaacaaggcaaagccgaagccctgccctgtttttcttttgttataccggttctttatcagagaatgctttttactgtttccagcatacccttctcctggatagagttcaggaagccggttaccatatccgtcagtcccggaatggcgttcaagtctccgtgctcgccccagatgaggtctttggctgccaatacgccttccgctactttgcgggtatcgcctgttgcccaaaggtctttcagcagttgcatgatttcgggagcgtcgttcggagtgatttcagcgccgtcggcacgcacgccgcccttgtaatatgtgatgatggcggcaagaccgagtacgaggcctttcggaagttcgcccttgcgttccaggtaagtcttcaagcccggcaggtcgcgagtctggtatttcgggaaggaattcagcatgatgctggttacctggtgctctacgtaaggattgtcgaaacgttccaatacatcggcggcaaacttcttcagttcgtccataggcaggttcagtgtctgcatcagttcgtcgaactgtactttacggacatacttgccgataacggggtggttgcaggcatcgcgcacgatgtttacgccgctcaggtaagccaccggagaaagcacggtgtgaggaccgttcagcaaagtaacctttctttcgtggtaaggagcttcggacttcacgaagagtacgttcaatcccgccttgtttgcagggaactcctctgccaactggcggagagagagattctcggctgcctcgataacccacaggtggaagatttcggcctgtacaaccaggttgtcggcataacagattttcttctgaatctgcgcaatctccttgcgcgggaagcccggaacgatgcggtctaccagagtggcgcatacatagcagtactttgtgaaccaggtcttgaacttctcgtaatctgcgccgaagtcgtctttccacagttcgatgtactggtagatacattctttcaggtgatgtccgttcaggaaaatcaattcgcaaggcatgatgataagacctttgctcttgtcgcccttgaacgtcttgaagcggcggaacagcaactgggtcagcttgcccggataagaagatgcgggggcgtcgctgaacttgcagttcgggtcgaacgcaatgccggcttccgtggtgttggagataacgaaacggatttcgggctggtcggcaagcgccatgaacgcagagttctgagaatagggattcaatgcgcggctgatgcagtcgatacgcgtgaggctgtttaccgcttcaccgttcaaacggccctgcaggttgacatggtaaaggcagtcctggccgttcagccattccgccattcctttttcgataggctgaaccactacaacactgccgttgaagtcggtcttttggttcatgttgtaaacaatccagtctacaaatgcacgaaggaagttaccttcaccgaactggatgattcgttcgggagcaacggacttgggagccgtctgtttgtttaatgctttcatcttgaaaatgattttaattatgattgttggattatgattgatagtctttcttactatatgcaggattattcaaactcaaaatagaagtcgatgttttccttcatcaggatgtcgataggcatatattttatggctgtgaccggctttttgaataccacgtgattgcacagcgctttaatgccgcaatagccttgcagtcccggccgctgcccgatgagatagttcacttcaccgtttttcaggtgttccacattcttctgaagcaggtcgtagccgaccagtgcatccagcttcagattctttttctgcaagtagtccgccacttgatacacgcgtgagttgaacacgacccctaaagcggctttgggatgtccggagaagaaagcatccagcacttcctcgttggcggcggtgtcttccttgtggagaacgacatcgtgtatagtcaggttcttgtgctcggccgcaagatactgcataaagccttccaggcgccgttgcatctgcacctcggcggggctgttcttctgattgttcaggaaaagtgccagctcctgcccttcgcggtagcggcgcatcagtattttggcggcgatgtatccgctgactttggagtcctggcctatatagcatagtgcatgagtctgctccatattgaagtcgatgaaggcataaggtatctttttatcttccagatacgatgtcagtttcagggtatcatcctgaaaattcggggctatcaacaccccatcggcaacaacggattgaagttgcgcacatgccgtttcataggatgctttatccgcatggctgtaaaaaagatagtccacccctacattgaacggccgcagctcttgcgcggcacggtctatgcccgccgcaacggagtgccagtaatcatgctctatataataaggtatgatacatactatatggtagcgtttctttgccgccagacctatggcaaacatgttgggatgataatcgatttcatcgaggactttttgaaccttatctctgcttgcacgggatacgtcgccccggttatgaagcacgcggtctacggttccggcagagacgccggccatgcgtgcaatgtcttttatcgtataattcttgttttccatcttctcccgccctaaggtgtttaaaggtcttacatttaaaacttaaatattataaatatttgccgcaaagatacgaattattttgtttctccaagtaaaatttctacttttgtgttcgataacggttaataaaagcaaaaagcgttatcgagcctattagctttacaatcaatactatataggtgtaacgacaagaaagtaaaatttttagatacttaaaacacaagaagatgaaaaactttatggacgagaacttcctgttgcagactgaaaccgcgcagaagttgtaccacgaacatgcggctaaaatgccgattattgactatcactgtcatttaattccacaaatggtagcagacgactaccaattcaagtcactgacggaaatctggctgggcggcgaccactacaagtggcgtgccatgcgtaccaacggtgtggacgaacgtttctgtaccggcaaggacaccaccgattgggaaaagtttgagaaatgggcggaaaccgtaccttatactttccgcaatcctttgtatcactggacgcacctggagttgaagacggcattcggcatcgacaagattctgaaccccaagaccgcacgtgaaatctacgacgaatgtaacgagaaactgaaacaacccgaatattctgcccgcggcatgatgcgccgttatcacgtggaaaccgtgtgtactacggacgaccccattgactcgctggaatatcatatcaagacccgtgagagcggatttgagataaagatgcttcctacctggcgccccgacaaggcgatggcggtggaagttcccggcgatttccgtgcttacgtagagaagctggcggaagtaagcggtgtgactatttctactttcgacgatatgattgccgctttgcgcaagcgtcatgacttctttgccgcccaaggatgcaagctgtccgaccacggcatcgaagaattctatgcggaagactatacggatgcggaaattaaggcaatcttcaataaggtatatggcggtactgcactgactaaggaagaaatcctgaagttcaagtcggctatgctggttgcctttggcgagatggattgggaaaagggctggacacagcaattccactatggggctatccgcaacaacaacagcaaaatgttcaaactgctcggcccggacactggtttcgactctatcggcgagtttacaaccgccaaggcgatggctaaattcctcgaccgtctgaattcggaaggcaaactgacaaagaccattctgtataatctgaacccatgtgccaatgaggtaatcgctaccatgttgggcaacttccaggacggtactgttgccggtaagattcaattcggttcgggatggtggttcctcgaccagaaagacggtatggaaaaacagatgaatgcactctccgtactcggtctgctgagccgtttcgtaggtatgctgacagactcgcgttctttcctctcctacccgcgtcatgaatacttccgccgcacgttgtgtaacctcgtaggccgtgatgtggaaaacggtgaaattcctatttccgaaatggaacgcgtcaatcagatgattgaggacatcagttattacaacgccaagaagttcttccagttctaaaagacgggaatgagataattttaaaatcagcccttccatgcttgataccttatggcaagcgtggaagggcttttcattggataccgctgaattaagctttcctgtgcagcagataccttacaggagatattccattatatccgtgatgttttttaaccggatgaagttgggatgcgcaatatccccatcatgggtttcatactgccaggtgacgtggtaaggaatgtgggctgcatatccgcccagctccaaaaccggcagtatgtccgacttgacggagtttcccaacatcaggaaattctgcggggcgcattccacggtggtaagtagtttccgataatcggcttctttcttgtcactcattatctcgatgtggcagaagtagtgcatcaatcccgactcccggacttttcttctttggtcgaacaggtctcctttggtcgccagtaccagcctgtattttccttgcaggcggagcagcacctcttccaccccatccagaagcgttacgggtctttgcagaagctcctgccccaacctgacgatttctttcacgcaatgcatgttaccttctcctccggtaatccggcaggctgtttcaatcatgctgagcatcatgcttttcaagccgtagccatacatgtgcaggtttttcatctctgtcttgaacagctcctgcgaaacggcactctgcggttggtatgctttcagtaaatcacagaactgatgctcaaactcctgaaaataaacctcgttttcccaaagggtatcgtctgcatcgaatgctactacttctattttatctttcatacgttgtccgttttattgttattgagtatatttgctgcaaatataagtaattaaaacataactattaatcagtaaaggatgactcaatcaccccaaactaatgccaaaggtttcagcaaagccttttgggtaagcaacacagtagaactttttgaacgcatggcatattatgccgtatttattgttcttaccatttatctgtccaacattttaggttttaacgattttgaagcaagtatgatttccggtctgttctcgggcggactgtatctgcttcccatttttaccggagcttatgccgataagataggtttccgtaaatcgatgattatcgcattttccttgctgtctgcagggtatttggggctgggcgtgctgcctacactgctggaagctgccggactggtggaatatggcgaagtaacgcgcttttcagggctggccgacagtagcgaacggtggatgattgttcccgttttgtttgtcattatgctaggcggttcgttcatcaaatctatcatatccgcatcggttgcgaaagaaaccaccgaagcaacccgcgcccgtggttattcaatcttttatatgatggtgaacttcggtgcttttaccggaaagaccattatcgaccccttgcgcaacgctatcggtgagcaggcctatatctatatcaacttcttctctgccacaatgactattctggcgttgctgtccgttgtccttctgtataaatcggcacatacggcaggcgaaggtaaaagcatgcgcgaaataggccaaggttttctgcgcatcatcaccaactggcgtttattgattcttatccttatcgtaactggattctggatggtgcagcaacaattatatgccacaatgcccaagtatgttatccgtatggcgggcgaaacggccaagccgggctggatagccaatgtaaatccttttgttgtggtttgctgtgtaagtttcatcaccaggtggatggcaaagcgtacggctattacgtccatgaacatcggtatgttcctgattcctgtttccgcgttactgatggcatgtggaaacctgctgggcaacgagattatttccggcatgagcaatattacattgatgatgatactcggtattgtagttcaagctttggcggaatgctttatttctccgcgctatctggaatatttctctttacaggctcctgagggagaagaaggcatgtatctcggattcagccatctccattctttcctgtcctctattttcggttttggcatagcgggtgtattgcttaccaaatattgtcccgacccggctttatttgcaacccgggaagcttgggaagctgccagcgccaatgcgcattacatctggtattactttgcgggaataggattggtggctgccatagcgttgctgatttttgccaaaaccaccgaatccatcgacaaaaagaagaaagtataatcttttatattgcatattttcgctatatttgtcgcccgatgtaaagacaggtcgcatccggcataaattaagcatgcttaattctgtcctcatggcactgtctttgaggggtgtcgaaatacacttgatgatttttttaggcacggattacacggatttcacggaaaaaagaataaagaaaatctgtgctttccatgtaatccgtgcctaaaaagaaacaaataagaagcgaattttaacataccctctttttaattaaggagattagaatgaaagtaagatttataagccttgcaagtggtagcagtggcaattgctattatataggcacagaaaaatacggaatacttattgatgccggtatcgctgtccgtaccataaaaaaaggattaaaagaggcaggtatcaacatggaaatgatacgtgcggtgtttgttacccatgaccatgccgaccatataaaagcggtaggcggattgggagaaaaactgaatatacctatttatacaacggcacgcattcacgaaggtattaataagagttattgcatgacggagaagttgcattcatccgtccgctatctggagaaacaacagcctatgcaactggaagatttccgtatcgaatcttttgaagttcctcatgacggtacggacaatgtgggatattgcatcgagatagacggaaaggtattctcttttcttaccgacctcggagaaataactcctaccgcagcacattatatctgcaaagccaactatttgatactggaagccaattacgatgatgaaatgctgcgtatgggtacttatccccaatacctgaaagagcgcataaccggtcgtaccggacacatgagtaacattgataccgcagaattccttgcagaaaatttcacagaacatctgcaatacatctggctttgccatctaagtaaagataacaatcacccggaactggcctataaaactgttgaatggaaattaagagaaaaaggtatcatcgtaggtaaagacgtacaactctgcgctttaaagagaactactccttccgagctatatgagtttgaataaaaatatgccgatttcatcgaaaaaaactcctggaattgtttgcaaaataaaataaaaggactacctttgcacccgcaaatgagacattggcgatgcactcttagctcagttggtagagcaactgactcttaatcagtgggtccagggttcgaatccctgagggtgtacttgaaataaggaggtttaagcctccttattttattggtttacagtaatttaattgattagacattatataaattgatgtctaaaggagtatcaaaagagagtataattgcatcaaattaggacacggtatcgcaaaaagtaatatttgtgtgataccaaatgtgataccgggtgtgataccaaatgaaatcttccaattttctccttatctgcatttattaatcatacttaaagtaaaagtatgaacaatgtatctgtacggctcgtctttgatagaaagcatgtagccaccaaaaaacatcaggcctctgtgcaaatggagataacctatcagcggaaacgcaagtatatcggaacagggataaagctctattccgatcaatggagtaaagacatgaaagtcaaaaatcaccctcaatcattggtttttaatcaaaggttgaatgacatggtagctgggatatatgacttggcctaccaaatgtcttcccaaaacattcctttcacttttgaaagattagagcagtatttaggcaattcatcgtctgaagttacaagctcattcctatcctttatggaaaagagaatatgtgagcggcaagtaagtgattcaaccaaacaaagacaaagatgtgtactaaaggcgctgaaggagtttggtagaataaaagactttgctgatatttgctatgaaaatattagagcatatgatgaatttgctaagaaacgatgtaagtgccaatcttcggtatataattatcacaagatactgaagatatttgtaagggaagcatacgctgcccatttgatttcggaaaatccatatcaaaatttcaagttggatcacggtaagcgcgtactaagacggtttctaacaaaagaagaactcatcaagattgaaacaaaacagattgatgacatttgtttaagccgtgtaagagatatttttctattttgctgttatactggtttggcgtatgcagatttggcggcttttaattttaaagacgctgtaatggctaacggaatgtatagaataagagatcacagaataaaaacaggaacgccttataatatatcgcttatggataaggctatggacatattaaagaaatatgacttcaaattgcctattatatctaaccaaaagtataatttatatttgaaaatattaggtgcattctgtgagataaaaaagaagctgacaagtcacgttgcccgacatacttttgcaacttctattgcattggctaacggagtaagaattgaggttataagcaaaatgcttgggcatacaaatattcagactactcaattatatgcgcatatatatcaatctgaagttgataaagaatttgaacgactcaataagattatatgaatatgaaatttataaccgtgagagaggctgccgaacttcttcgtgtatcttacaaaaccgtacagcgatacttggctgaaggaaggataccatacactaagccagccggacgaatattgataaaggaacaagacttgatgaacttcgttaatatgacgaatagataaaatatatgcctcggttactttgcactgtgtgtcatttatgacctacccaaataggtaaaagcccagattactgttttgacatatggtattcaccctaagtgaccggggtattttcttttgttagaagaaagtgaattatgattttaggataatcaaatcaaaatacattaaacgggtgcgtttatactctggttccaggtccagtttcatgtattctatctcctctgtaatattttcaaatataaatttaaatccattacgttgataaaaatctatcactttttcattattggcggcatctacaataatataacggcatccagtcttatttaatggatcaataaaccaaccttttataaaagacaagatttcatcaccaatatgttttccggcaaaagaatcaaatacagccaattgtccaaccaatacagctggatattgagagttgcgcttgacgttgggtattgggcgatttattttgtttcttatgctcttaggtaaggatgaaacgggtaacattgaattggacacagtaaatgccgcaaccaattctaaagaagtattggtcttgacaaaaccgtatgatttaccaagtaattgattggtgtaattttcaaaatcatctttgaagaagttttcaatatccttgtcgtgattacatgaaaaatcagagcaattctctattagagttctgctccattcaacaaattcgcaattatcttcaataaatgtacccactatttgaatctacgcaggtttgatttttccaaaatccttttggtcatctctacttcacgtgaaaaatcaacagttcctcgttttttttcattctcacgggcaatcttttcaaatttttctgcgactttgccggttaatgttggtattggtttgatataaactgccataaatcaattgttttgcaatacaaagatacaacattagttttactttttcttgtatcaccattaaaatcatccttatcagcactacttttaacacaatcagtaggatcaagttcagtatttatagcagcattaacaaaaatgcgatgagtagcattactattactcaccgcatcatttaggttaagaacaacgcttgcagcccttatgaaaaacttttatacatgccaagggttttgatatgggtcataagatgtttgaaaggttgccatctgccagtcagtaagaggttctttcttgttatcaatttttctcggaatttgaggatttaattttaatctggaagcgtcttttaaccattgcatagaatggtcgtagtcatcaattcgtacagtactgatattgttcggagaaatcagtttgtgcaactcgtataatgacagttgaaccatgtggcgtttcaagttgtagtttcttgggtcatggtgtctgatattcctttccagttccggtacatcagcattgggattgataataggataataaatttttcctttatattctacatattcgtgttctgacaattcataagaattgagtgaagggtcatattctccaatcatcccccaacagtcagactccatcggattgaccaaatagtcataattatccgttgttagcaaggtgaagaatttgccttcatattctacaacttcccattcattgtatggaacggtgtcccacttgtatgtatcaaccatttcccaggcattaacttccgggatacgaatatcattgaaatctatgccattggcgatgtcacatatatatgcccgacctaagaactttgccacatctccaggccgatagtttttcatctggctgtattgttctatttcttccaggttaagtatttcttctgtttcgtgccaataagaagtagggcaaggggatttgtagccattgatagcttgaattacttcgcatattttcccgtcaaggtaaaaatggcatcctataggataactgattcttcgatcatattcaaagatgaatttaccgcgatttagttcgcgttcaatttcgtaattttcagtaaggtaatccataatagatgcttcagcggcttgttctgcctgcacaaaacaaatatcttttccacgggtaagctgtaacaaggcatcttctgtaatgatacccaaataatcatccttgtttaaaaaccttctatacataattaatactcaaaagtgttatagactggtgctgtatatgtttcaattgttgtcttttgattttggaaccgtctccattcattatttaagaataacacaagtacataatcgagaatatctgataaatgcccgtatttttcttccttaccacctgttttcgggttcaaaattttctttttggccttggtcccatcagagttcttttgttgatagaccatatcctcggtaagttttctgcatctcatatcaatcattacttgccatccgttaaaaccgttaaggatagcattgacaaattcaagcctggtggtttgtggcggctgtttctggagcagttttatacgtggtttcaatacaccgtttttcatgttgtctactataatagtatagttattgactccctcttcggtttgtgtgcttcttgcagcaccagaagggtctcctgttacgattatcccgcctaaatgctgtctggaaagatgcttctctcgtattttaatagcaagtttcggagtattgttctctttttcttccggcttgccaatgttttcctcaagtacatatatcttcttgtttgtaaagtcaaactggaattccagctcactcatgtatggggctacattgaaatcccatccagatattaatggattcattgggttatagactttttcgcgtaacccatccactaaatgcttggcaccatcaaagttccaataagcggccatttcgttgacatctacatattgccagttgccatacaataaccgttctctgtctgccttgttagaaatcctcattaagccattcaagtattgtctacgaaattcagaatcaggattatcataaacactaaaaggaatgtaccgctcatactttttacatatcacatcgttaccatcatcatctaaaacgaatctggaacggacccatcctaagcaagggtttgtactcataagcattttaggtactacaagggtattggggatattccaacgaatacgactgaataggatttctacggctttctcatcaagctcaccgcattcgtccaggaaacatccggaaaattcagatgaaccaaaccttaaatatgatggatcacttggctgaaagctaagttctttcatgattatcttagagtcattccaaaatgtcatttctccggataaattgtttatcttataattaaccccctctttcagtccccaatcttttgcaatcatacatatagtattccatgtactttcccgaaggctttttagtgtcttacgccctacaaccatacgcatattgggccatctcaaacaacatgatataagccagctggcgccaagaaaggagttgtgggtgacagtgaaatcgtctactacataaagaccagaagggtcatctacagttatacatctgcttgtctgttctcctatatattctacatcaacgattcgctttccaagttcgcttgccccaccattaaactcatatttggctctttctttttttctggggatagatacaagttcggggtttatttttgttctaaaataaacatcataacaatcgttacattgaatatattcaccatccttcttatatccggctgcacccttctttattgtggctacaccacctaaagagcgcactataaaggctacatcttcagctaattgcttgcttatagttgagtaagacatgtgtcctctgtcgtcaacatacccatctgtatccataagcccctgcattaattcaatgcgttcttctacagtagcatatttatataaatcgggaatgaatttattaattgatgtgcatcctgtaaggttcaacttcttgatcgcttcggccagtttgtctgaatagatatagtattgagtagctttactgtctgctttttttgatattttagacatatcataaccgtatacggtaaacctgtcaacaatatcttgatccattgttgtcaattcaggatatttcttggatatgcaaccgtctcccaataaagcccccaacacatagggctcaattatatttttgcgagcggctgctgtacttattgcaaacttgactggagatgtcaatggaattatcaaagaacgacccttatatgacccttgtttatgtttttccacccattcaaagatccattttgtaggctttacccgctcattcatcttatctccattcaaatctgtcctttttgtacgcttcccggcttgatgcacattccataaatgcccttctgatgaatctatatatgtgccatcaataaaatgtattctataaaaatgatgtttttccaaaggatgtagccatactacctcttgcgcccctccagtaatcggatttgtaataaaatctcctacttttatgtcttttagatacttaaaccctgttggcgtacatattttactatctaaaggtagcattttcccgccacctgctgccccaccctctaaaatgatttgtggaatatcgtcgttaccacattttgtacatacaggtttatatgttgcatttccgtttctatcttttccgttttctatatgttcaattttaccaccgcaaataggacattcgggttggaggcatttccatacttcatactgttttgacgatggttggaaatctatgttgagattactgggaggtatcaatcctgttgccatactctttccatctctttaaggttactcaatgagatgtgaagagtttgacgtttactactcttgttttcaattgtgatgactcccaatgtttccagtttcaatatgtgatgttgaactgttgcgtgactgaccacttttaggtcttttgccatttctctgtaggatttgctgatatgacagccataggtatctatcagacatcttacaaaatccaatgtaaaattttgtcttaataaactcatagtgtaatcaaatttgttatataccaatcaataatagaataatgtactgtatgcttacgttacatgtatataaataatagaagccggtcataaaattaacgaccagcttctacaaaatggaagatatgattattagtgtgagtaaagaagtaagaaatcaattttgtgcttcgttatagatacgttcaactacagcccacagttcatccggcatttgttgttctgaaatagcttcgcatgacttacgcatataatcaagttcttcactggtaaatttcacagccaacggggtttctgcgtctttttgaacattccattcaattcgtttctcttcctttttttctactatttcatactctttcttgtcctggtctgaaatagctattttccgaactattgacttttttagattatagtccataaaactcccacgctccgggaaaatggaaggaataagcaatctgtctttaatatgtagatccataacttattaatattttatcaagaatagatatttgtcacgcaactggttggagaaaataggattattttttaattttcaagtaaaatataatcgatagtataaaaaccaatgctgaccaataaatcttatccttatttaagtcccaccagcttagttcggtcactttatcggaggactgactcaatttatcaactgtttggtataaagagtctattttcgatgatatttgtgatatagatgcagctaaaacttcagttgatgtgatgtgttctgtatcttgcttgttgatattagttgtgctttgcttaattggatattgttttccggatgaatctggtaccgataaatagactgtagtgttttctaattttaaattgcttaatttatcagatgtaatttgagattgtttgtcaatgtctatatgtagggaatccagtgatttgtgaatccgttgtaattcacaggaataatctgtgtactgttgccgctcaatgtttttagaagcagcacatgagctgagcaacagcacgccaattgcaaaacctattatagttattagcttcatacaatattgatagttatagattcacctcttttttgtgctgcttcaatctttttgttgagacagtctgaggtatatctggattcacttaatcgccctacagcagagttatttcctactaatatacatccagcactatcttttgctgtatttccactatgtataaggatgccttcaaaatgaggaacatctaatagcctgggaagattacggccaaacttgggagaccaattgtaaattactttatatttgccatacggaatagcagattctccataaactttcttctcgccattgtcaaatactccgttcttgtttttatctacaactttatcctccagtgtattgcagaaaaatttattatctatatatagcctgcccacagtataggtttctttaggccacaaacgttctaatcttagttccatagttttaatcttttatttgtgatattaatgtcgcgatctttattccacttcttcttatatatttaccaaccagttgtttatccatctttttatcgttacagaaagacagtcctataattccagcgggtttttctccatcatatagtgtaagcaaagcaatttcattaatgtcattagattgaaatttataatatagacgctggtctattttatgaacatcttctattccaccataaaaatatccatcatccaaaactttggaaataagtttatattttgacaaactgaaatctgcatagtcttcatctacattttgaatactatccctgacttcctcaagtcgcatggaaccaaaaaggaacggtagtccagtagtcaagtttttacttccattatgaaactcaataagccatgcgcggtctgcattggttgtgaatatcatttttgataaaatatgcctaatgtctgaatctgccgataatcttgtggttacaagttgatcatgttgttctgtacttatttcaaccatacgatccaaaagatatttgggatttagtgcaaagaatacgatgtaaccacttaaaaataaaagaaacaacccttttacaatactgaagaagccatattttttttgtagactgagtaacttttgaagccacccaatgcctttatttagttgttccatattaatgtgaaataatttgcactgattgaactgggataaaccattctaattcatctgcaaatggggtgtttaaacgtacccatacaccttttgtcttttgattttgaatcttgttaataataaccccatctcttcctattaatctttttaatttccattcttttaatagaggggaagcaataattgtgatttttcgtcctaccatttgtttttattcaacactgttttcattattagattgaggaacaatgacattgaaagtaattcctgagtcaccgtttcctcctttcaattcaactttgctctcttgagcaactttaacaggatacatttccattaatgcttttgatgcttgtacggccacagaacgtaatggtgcaggtgaaagcttcgttcctctcctatctgtatacacagctttggaagtttcatctacaatttgcagtaatttttctgttaggcgagctttcatatctacagtttcataattcgcaatggccctcaactgtacaatatagttctgtatatcctcccgattcaacagctctttagctttttttctaactattgtactggaatcgccaaacacatcctcgtagcattttttttcattgccaacataaggatcacagcctaaaacatatagttcgcaaaaatcaatctcctgtttatttaaagattctggttttcttaattccatcctattgcatttataaaaagcccagccgatatgttcaactgggcttggtttttatataagaataggcagctaatactttataagtttgttttttaagaattactttccaataaatttttcatcacgatttgcctaaacaaatctttaatgccatccaacaaactctccacgtcagcaatgttctttaatttatcccggttaaacttgaattgtaaatcatatccagatatttccataatagtttcatgagtgtcctctgtcattacggcacacaccactctatcggaaagagtattaaagaccacttctggttctaaacctgccattttagcttgttgtttttcttcctctgtagtcattgcattatattttaaaatgaatacgtgatttttcggttttggtcataaccataccatcaccatctataccgcaagcgttacgcattcttttagtgcataccattgccacgttggtggttgctgttacatccgcatccgcgtcatgagcatcatccaactcaatcccaaacttttcagccattatttccaacttgtagcttgtcatatcttctaaatgagataaagctaattgtcccaaaacaatggtatctatgtataagggctggaagtgtccataaaaatcggttgctcccctcattagttttgcaaactctttcatttgccccccatattccatcaattgttgcataaaccctatatcaaacccaatattttgtcctatcaagaaaggttttttgtttagtccttttgataatgtatttttgcggatgaattcaattacttcagatgcaacaactttgatgtctacaccaagtgattctaacatatccatagtgatagcagaatatgttagagccttctcctcgtatttcattggtacttcatcgtctttatcaaatttactctttagtaccttgcgtttagatacacccttatctggctgttggttgtatggatatatatattttacatatctatcaatagtttcaaaagtgtctatgcgtactgcatgaattgcaatttgagtacaagcacaatcctgacagtttaacccgccagtttcaaagtctaaagtaaaagctacgataatcggcttttcattattcagagttgccatattattttaataagtctaatgttagttgtttgattttttcttcaaattcttcaagggaatagttatttctaataatataatcgtattcctttaatggtatttcggtacggtctaaatcccgttcacatcgctttttgtcaactccacaaccaatacgatcaccaatgtttcggtcaagatatacagaaaacacaataaacgagtctggaaatttctctttcaaatatatcaatcctttctcgtcaataacataggtgcatattttatgtttcgtttgttgtaacgtggcccagtactcatatcctccaaaattagtgtaggctatcatttcagacgcgtcaggcttatcttcaggagtaacaaaccaatgctctttcccatttgtttccccatctctcattgggcgcgttgtgaatgatacaatagttgggatgccgttttcggccataatgtttgccattgtggttttgccacttcctgatggtccaacaatggcaatgacaataggcatgtttatttctattttcataatatatctataattgaagatttgtataattgaagattgttttcacctgtaaaatcactgtgtcttacttgtgctgaacatattaacattttattttttgcacttccaagaggaccgcccttgcacagtattgcccggacattaacccattcatcattccaaataatcatttccaccaaatcattattttgttgtaataataatttgcaaaaaatacgattctctcctgttttcttgtctttgaattttttctcttcaatatctacaatactggcacaaacagccacccttttcccatcataatctgctttttgtatattttttaaaagtgcccaagatgcttttccttttattttaggctttgcttctgaattatcataaatacgtttataatcaatggcaccaatgccactgacagcaatttgctgttgactccagaaataatgcttgcctcttaaatcttctggaatatctttttctgcaatcttaaaccctaagcattgtgctgctttttctaaaatagcatatcgttctataacagattgtgcgttttctatcttatcaaagcatccggctaatatcaaatggcgaatatgccttgcattgacggggcatttggttgcttcatctgcgttatccggctcatcccaatattgatattttttcagtttatatctaaatattctttctataaagttctcgatggaagtaaattctccacgcaagtctcgttcgttaacaatccattcagttgcctttgcccccaacattttaatacgagaaagggaccaaaagatttcgtctgttttgtaatcagtaaaaaaggttccaccacttacatttatgtctggtggcactattttggcgttgctgcataaccccatttcactcattaatgtgggtatttcatcatcttttgcccattgaagagctatagtataaaatgctgtagggtaattggctttcagataggcacccgcataagctgtaactgcataggcagtggcatggcttctattaaaaagataagagccggcaacctcaaacatgtgccatattgcttctgcatcttctttgggacacccgttatttaatgctccagccataaacttgtctcgtaaggcaagaatcttgtctacttttttcttggatataagcttcaccaatttaacgccttcgcctaaactgaactttccaacttcacgtgcaatctgtgccaactgttcttggtaacacagtacgccgtaagtattcttcatggcattgtaagttccccaaagatacacaggagcagcatcccctaacttgcaatccacatatttatttgctgaaccggagtctaatgttgctggacggaataaggcattagctgcgattagatcttcaattttatcaggctgcataccaactaaaaatttagtcataccttttgaggaaaactgaaagacattttgagtatagcccttttgtagcaattgatacactttaggatcgtccaatccgctttgcactatatcctgaaaggttataccggcatgatatttatcattgcaaatattaataacagcttgtaattttgacagctccttaataccgagacagtcattttttagcaatccttgttcgtctaaagaatatccgtcaaattcagaaattagcataccatctattttcttgatgggggtaaaatcaaagcattcaagttcttgtccatctttataatctggagtcacaagtagtgcagaagcatgaactgaagaagaacgaggctgccccattaaggtacgaatatcttcaattacttgtggatattccattataaaactatgtacctttttattggtagcagccattgtaaacaggtctgtccaattcatattgtcatcctcaaatatagctgtgatataattaacaatatttaccggcaccctgtgtacacgtgctacgtcttttaataccgcttttaattttaatgttgtaaaagttccggcagagaatacacgctgtttgccgttatgattataccgatgttcaatgtattcctttacttcttgtctccggtctgattggaaatcgacgtctacatctggaagagaaccaccaggaccttgcaaataaccgctatctacaaaacaatctatggctttcacctttgttgaagatgttttgtgcttaactgatatgactttcatatttaattaatttaatcgtttaccataatagttgtcttctgctttatatgccctttcaaaatcaatcagggcatattcaggaataatcattcgtttagtgatgaaagcatccgaaatgataccctccagagttctacaccggctaagggctacgtataattgccccggacaaaaggtacgagatacgtgaatagctattttatcaaaggtaagcccttggcttttgtgtatggttattgcccaagccaacgttaagggaaattgagtgcacgaacctatttcttcttttacaatctcattttcttttaatatatattgagtattgctccatgtgtggcgctcgaattttatggtttgaccattatccatacagactgttacaacattgtttttcagttcttttacaacccctaacattccgttgtaatatcctttttgtgcatcgttgactaatgacataactctcgcgccaacacgtaactttaaatgcaaatcacaaggtatagatgattccggaaatttatcttttatagttgcttcataagtctttatatcttgcttacccaatttatctgcatttattttttcaacttcagctttatgagtacaaatatggatatattcaccatcatagtttttgctaatttgacgatcccttaattcgcccaatatctccagttcatcggaagtaacctgatagttacgaatgttattgaggatattaataaattttggatccgtttgtctgaatatttttgttagttctacgacatgaaatcctgtccgtttaaaaaccaaagcgttgaaaaagaaaaagtcatcataaaagttagataaaattttaatctcctggctttttgttactggaggcaattggaaaaggtctccaaacataacaatctgcacaccgccaaacggttcatcgctttcatatacccacctcaatttacggtcaacgacatcaagtatatcgggacgtaccatactaatttcatcaatgataagtacctccatttgtaatagcaattctaccttgtattctgaaaatttattttcaagatggtcgtaaggggtgatgggaccaaaaggaataccaaacaaactatgtaatgtaacccctccagcattaatagctgctattcccgttggggcggttaccatacatttttttccagaatgttcaatgaggtattttaaaaacgtagtttttccagaaccagctttaccggttatgaacacattgtcttgtgtattttgaacaaggttcataacaagctccatatcttcagtcaaaaccatatcttccatatttacttatttttctatttttacatataaagcacaatgacacatatctttttctctataatcagaacaggggcacttggtgtcttcgccggtattatggcatggacacataccattgttcttctcacacatggataagattttgttaaccaccttgtcgttgggattaagctcccaccctacttttcttaaaattggaatcataattaaatttcatttagagtaaataaaagatctcgattatcaaattgaatatcatcattagcttgtagctcgtctgcatacacaacaataggtgcgtctgttcccatgcgttttacaaccaattgggcgtccttatctattttgtaagttttatgattttccagcgttacttcgacatattgattagaatttatatcttctcctattaccgttacatcagaggggtatagcccagcacgttctggaagtaggaagcgttcaaatagcaaattgtactttattgggtctatcaaggttatacccaacagatataaaactaaacatccgccagcagacccacgcccacaacctactaagatgccgttttctcttgcccaatttaccgtatcgtattgcaccaacatataatcaacattgttggttgattctaaaacatatatctcatgttctaactgcttacggtaaatttcttcttttcctttaggcaccaatttgttgaagccctctttaagcagactcaaaaacatctcatgccgattggcatattttgatttttcgtaattggtcatgtcatattgcggcatgaaattacggtctgtttcatatctggcctttgccccattggctatttggactgtgttttcacatgcccaattaaatataccttccacatcccatttatcttcatcaaataaagacgatatggtctgccagtgctcgtccaaatctttgaaatattgatcgtcactttgttcgtgggcagcaccttcagctattttatttagaataattttgtttttggcatcatctttatccaggtaatagcagtcgcatatcaatactggaggcagttcccccgtgtagtatatatggtcgaaataatatttagtggcatctaatactttaatgtcaatacgctctgctttaaattcagataaatctaattggtaaaaacaatcgtcaaaatgctcaaaaaacatatcaaggctatcccaaacttgtttcagccaaaatgatgaatatttactgaacacaattatgttgccagctccatattttaaaaggtcttgcagttcaataactttgttttcagaatccacgtttatacatttttgtattctgagtaagttttgaagcccttgctgtgattggcaatatattttggcatctattttttcgatgccatcagtaaatgtaagagaatacccaaatatccattgaattccggccacttcgcattctttttgaagaataagggttgctgccattgtattataatcacaaatgcccaatgccttttgacctaaatgtttggtttttttaatccattctgtcagtgagaaactgccatttagtaattcaaaaggggtgtgtactcccaaattaacaaattcttgattatgaatctgctcttttcttttccctatgtattttaggatttgaaactcaaaatctttcctgatgtcataataataccagttatcaccaaattgaaacacaatgtaatttatgccctcatcttgcagcgtttgaatattttccattgtgttgaatttaacgttattgtctgcatcggtacgaaaaatagactttatcatactggtatcttcataatacattttcccgaaacctatgatttcaatcacgtcctcatctaagatgttgaaacacatcttattgttatttagccaatctaataaatcagaactcatatttgaatcttatttaatttatattctgttaatgttttaagcctgaaggcaaacgtatcgtatatctcccaaaagtccatactatcaaaatcttggcttgaatcttctatatcagcaatatagcagtcaaaatattcatttagccgttctcctgttttctttatggcatcaactgcatctccatcgtaccctatgacaattgtgtgtactctttttgattgcagtttatatatttgtatatcagatattttctttccaaaagtggcaacaattgctatatgcgtattattgtatagatttagttttctggttagggatataacatcaaataccccttctacaaggattacggtatcggtttctccttcgattatagcatcgtaattatacagtaacttgacaaaatcattttcagtactgtttctatatcgcatgatttggaattttccattacgtcttgctttcctattatactcatcaatgtctgttttattccaaatatgacgagaaatataaccaacaacatcgccagtatctataatgggaaatattacataatcatcaaatttaaaattcatgtgacgcgtggtgccgactgggaaatattcgtaatcatcttctgtaaaccccctttgatttaaatacttgttaaaatgagtacgtttgtaatattctggcatttctactatacaaagagaatcatctatttctttctcttcatctcctaaaaaagagaaactattgatatgcttatcgccgtttaaatcaaatgtttccgttacaatcagatcctggcggcctatatctgtcaatagctgatctaatgtttgagttgaatgcccacatgaaaaacaatgagccatgaatggctttttcctttcggtcggcttacctatatatataccgtatttccctccctcgtgtccacagtaaggacattgaggaacaatcaaattttttccgctgccatcaggctttgcatgcaattcaatcgaaagttcttgaattatatgctctttttcttctttactcagttccatattatgctaccttggtaatattcaaagttctttctctatcatagaagcgctcattctcataatcagtagcgattttgaacgggtctccttttttaaagaaacgtgatttagcaacatttaaacgcattgtattttcgcgcatttcgttagtactttgattaagcgttataaggtgggtcataggccgagataaccccttagcctccgcacaattgtattctgttaatacattctgctcatcattaagccaatccttattttctatagttgcctgataagtcacaaccatccatacattttcgtctcctgccaaatccttcaggtcatttgctacagcaacacgtttatgccgttcaccattttctgaccattttctaccgctggaatccgtcaatagatccatagagtcgataatcactacatccggtgatactccatatagttttctgtattcggttattccgttttttatatcgattgttgatacctgattagcaaattttggaaaagactttacttttaatgtaccggacatggcctttacttcttgtatcattcgttctatctcccggtcttttaaagttccggtactatatcggtaggaattacaagatacaagtgatgcagaatacgcatctaccacttcatcctcagaaccttcgagctggaagtgtagtacattgaggccgtctatttgagatgcgcatttgcctatccaacgtgcagcatgactttttccaactcctgtgggagccaaaaaacacgtaagctgtgtacgtaaatcgcgcccgctattcatttcgtctaagccgtctatgtaaaatctggtgataggctttagctttgcttcttgattgtgcttttctcggttacgtttaaagcgtgactcaaaagtttctgctacatcaatgaaagagtttgggcgtaaagtaaaattattctgccattcagcaaatgattggagtaacttgattgctttgttacgatcttgttttgcatatagttcaccgacctctttgtaagtcttttgaaattttacttgtctcaaataattttcaaattgctctaatacaacatccggttcaacaccttctgcacaatcctttatatcttctaataaagcagacacttccctgttgatagacactatttggctgataatgtttaacgtgggggcagatttgtgttctacgaagtatctacgcaaacattcatgtaatgcttgaaaagccttatcaggcagatatgatttttgcatgtgttcgcatactaagttgcatacataatcgtgtgcaaagcatgcgtaatacaattcaaacaaaaaatcttctgttaatacgttatcttcttttgccatattcttcgagtcttattcggtataattccggatatttgattgcagtctcttgtttacatttctctacattcatacacatttggcatgccggagagaacggactccacattaaagtagatgtggagcagatgacaaaaccaatatctgtattaataccacgttttttggtgcattcttcagaaggcatataaatatatttagcttgaggatgctcccttttgttaactaatgaattcagatactctctggtcaattgggcttcagataaccatttgtcttcggaatataccttagacttagaatacattgatagatatttttgaagagctgtgggaccaaatgcttttggggccaatgtccgttgatattgggcgtttctgtttttatgaagctgaaacacacaataatctacaagccgtgaaatattaaattctccaccgcatatttgtgtaaagtcaacaataaatttggatagttggcgttgggcttgccctccttcaggaaacgagaaagaggggtccaccaaacgtctggctatttccgtatatattgtcttaatctgtttcgtcagtcgttcttctttttccatcacgagtcaatagttgttgaagttgttgacgcgccaagaataatcgacttttgacagtttcaatattacgagaatctaaggcaccgttccgatattcaatttctgcaatttctttgagcttgtaccctgcttgttgatataaaagcgcattccgatattgaggctttagctgttttaaagctgctaaaatatcatcattgtaaagctttttgtaattgtctattcccatagcgttagaactaacttcatcaaaatctataatagatttatccgaagagaatgtttccacatcgttgtcatcgtttagcatattttgatgacgttttttgcgctggtccaaatcaaacacgcatcgtttggtcacaatatgaagccatgtctgtatcgaacgctcaggattatatgtttcaatatatttatacatgtttgtaagcacttctatataattatcttccacatcggaattattaaaagtatagcgcatacacaacttgtatatcattcggttatacggtgttacgtatttatcaaataaggcttttcgccgtgcagctatctcatcactgattactgttgttccttcggtagccgctgagtatgtcttttccacgcctcttgaacattgagcacaaacaagtgatctgagttcatcaatttgtggacattacaatactgcttccacttattgttactggagataaagttatttcttacctcgttgtctgttggttgggggcatttgctgagaaattcataaaaatctcccagcaatttgcccaacaccattaaatggggctggccttctctttgttgcctacgccttatgtttcttgcgtaactcattttctgtctaaagtttatatattcttacataatatttgaaaatgtgagttgcatcagccatattgtcgtcaaccggtgtaatattccagcgcttaatgcaatactcaatcatcttctttttatcagcttttccgtcaccggtagcccatttttttactgtgctaacgtttatgaatttgggttctgggagtccaagctgggcgcatatcagatataagattcctctaaattcggatagctttcgtgctgcaatgaagtgttttgacacacaaacatcttcagcaacgattaatttgatattatatttatggataaaatcaaccaatgtgtcataaaacattttatgatgttcaatcgcatttttactttttctttgagtgaaattccatgttcctgattcatgtgttgaataatacccacagtgctctgctatatccaaagcaagcacattatcacgtgtaatttgatttactgactcatttcctgtattttttaattcattaagcatctataaatgaaataccgttaagtttattgactacagtcttatacggataattctcagctatgtttccatgacttaccaccaaagacgtaatctgtaattgattcagggcatcaaagatgttagaaagcccttgctcatcagttgcttccaatatctcatctaaaatcaaaaggtccagacctttattatcatcacaattgatattagtgagtttgtgcattgctaagatatttgccaaatttacccgtgccttttctccttctgagaatttgtcaaaagagccacagtctacaccatcacgaataatagagatagaaattttgtctcttatttttccgctctttaaaacagtgaatcctgaaaaagcaatacgaatatcactaccgattgcctccaaaaactcattcgttatgtgactgagagcatcaatctttgtgttggccaaatgagtcttgaattcgataaaagttgcttcttgctctttatatgaatttagcttttgttcgacgttttctttttgggaaatagctaatgtaaactctttctcgtattttttcttgttggctttgagtgtttcaatcatatccgtttcagaagcgttttcaatgtcgtgaatagattcctcgtatgattgaatagcaccattggcattgttgatgttaagttccgcccttttaatttcagactcttgtctttgaatggcttcatccaatattgcataagcatcatcaaacaggttgacacgtactccttcaattgatttttggaggatattcatttgattttggagcgcttgcattttgttggccaaactggaggcaccacgggataattcgtccaacgccgtgcaggtttcagtaatttttgtggaccattctatcttacaattattcaagcgatcctgctcttgacgcgctttacgtccttcagttgtaatttctgcaatacttctttcattggtttcgatactgttgagaatatcctgtgactctcctttgcggtcttgtaattttaatttgacgtcatttatatcaatatcattagccaatgtaaattcgtgttgacatttgggacacacaataactcctgcaagctgtttttgcagatcagcaatgtccgcttccaattgaacacgttgtgtcctgagtctgctgttgtctgtttccaacttattgacagaactcaacaacatattgattttctcttcagcttttgtagattttttatcaaaatcttcttggaatttttcgtactgtttcaataatttaccataagaatcttttgctataacaatctttttgtcatgctgagtgagctgtttttgcacttcagcatattctttagctacaacctctaattctttttgattttttattgatatagcagcaaagttccgaggtaacggtaaggtgtgcgatgcaaaatgctctgaaataatttcaaaacattcttttgcatcctttttaccattctctaatttttgtaatactttgtctgttttatcgtattggtccaatatctcattggctttgtttatgagaatgttctgttcgcgaatatgatttcgtttatcagcaatagccttgttccaatttgctatacgctccgcttttttctgagaacgttccgtagattctgtgatagcggtattgatttgttcctgcaaggtttctacacggccagtatggttggcaacactcaactctgcttgttttaataattcctgaataggcaccatgtcctcctgcaatgctataatagactcatcgactattacaccattgctaaagcggttgataatttctttcttttcacggtctgaactggaaagaaaagacaggtatttgtgcttagaaagaatgaaattggaaaagatgtcttcttttgttaaccccaatgtttctaaaatgaatttgttataatctgcaacacttgcctgctctatacatacttcattatcttctgtttcgtttgcacacacaaaaactttaataacttgtgccgctttacgagaaatgatacgctgaatggttaaacgctgtcctgtagcagtgtttaaaagtaaaagggaaacaatagcttcgttttctgcatcgttaattatttcatccattttaattttccgaagtgtttctcctgtaattccaatagcgatagcttccagcatagcggattttccagaaccatttgaaccttgtgaatcattgtccatattgttaccaaaaatcagtgttgtatgtttttgtaacaatttataatccaatagcttaaaggcacatagattttttgcataaacttgtattaatgtccacatattaactgattttatcgaggtattgcaaccccatttctatatttgaaattcctttattggcacaaaaacttgtatattcttgcttgatgccgaatttgtcaaattttttatctaatgaatgagatgttgtttctgtaagcgttagctcttcggttacgatttcaacttttgttgctccagcttctaagagcttctgcttatcaatgtttacggcttcttgagttgtacaatttatccttgttttaattttgtatcttccgtccgcctttatgtcatccagcttatccagcagcttagaatttacttgactggcgtttatatctaatactttgtaacggacatttacttgattcttaacaaactcatggctaccatcactatatataatagtatagcctttttcttcatcttcaccgaaattatgctgcctggaagaaccgatatattcgatgtttgttcctttaattgtacaacggttatggtaatgtccaacaagaactatatcaaaatcgctgaaaatattcgtaggaagttctttttcattgggcgtactaagcgcaccgttgatgccttcgtgtatataaagtatattgaaaacagaatggtttaattcagtacggaccatttcttttaaacgattgacaaaacttccattctctggaaaataactcattatatacagctctacattatcgctgatatttataatagaatagtcgtctactacatatacgtgaggatattcactgaacaaatggctatagcctaaaatggattcttggtcaaccttacaatgatttccttctgcaattgtaatagtaattcctgaattaatagcttttataatagcttgacgaacagccattaaagtgtccagtgtttgggaagaacgtgataaccacaaatctccaccaattattaagtcttcaattttatattggtcgcatataaacaatgcttcatcccaatttttttgaaactctggaatgttgtcctttgatacatggatgtcattgaacaacaaggcacttggtattttattgctcattgtgattcaaattaaaaaaggggtatgctggtatttagtataccccttttgtggtgttaaataaatggttatcttcttctacgttcgggacgtgcaggccggcgttcgcgaagcggggttgctgccggctcatcagtgtcatcattatgttcaccccgtctacggcccgtataagcgggggctggttccggttcgggttccggttctggagttggttccggttcaagagtagcttcttgaacagaacttgaattttcaccatcagaattaatggtacttgaattcgcatcactgcggttattgctattctttgcaacttccaatgcgtcttcaatatcggtcagcaaatcctcatttgttttattacgagtaacacgaacattcaattcattggtatcaataaattctcgtattgcatcacgtaattcttgaccttcttcgctcttatcaccaattccgcgttcattgagattttcccaaatatcccataatgaatccaaatcattgtcggatgtcgcatcattgtcgttatcgttacgttcctttttgtcaaatgagaaatgagacttatcatcagccggaagttccattttaattttctcaatggcttcttcaatctctttgctactcataacatccatttccattttcacatcatattgtttcaagaattcaatagttgcttccaaatgaaaacgtgaataacgatagatagcggatggaatacgctgcgtttccaataaagccttgatttcttcttcagacaaaggatccgcgcctgagagcgtatctatattgaatgtgtaagtcgttttcttgttttcttctttacgggtaatttctacgggaaaagcgtcattcactgacgagatcggacacaggcacttgggatttttctccagaagttttttccatatagccaatttacgatcttccaaatctttgtactgagaataagacagggttagtaattggattccttcgctacggttagctaaatccaaaatatacatggcacgctgagagttccattttataccaccctcaaagccagagcctttaatctttttcatcagtttttcatcatcaccatacttgtcttctgcaacttgcaaataagtgtcaatcaaatctacagatagtccggcatagctggagtgacaaacgtttacaaaaagctgtttgtcttttttaccagtggaacgtgggttatccagttttaaaacttgtgttttaataggatactcgtatcccttacgttccaaaagataattaccatcaggctgttttgttggagctaagggaagaattcgtacaggatacgtgcctacagaatcaatacggaaatgtttggtacgttgaaatgactgactctcacttacactttttttgactgcctcttcataagtctcttggttttccgcaaagaggtcatacggattttgaatcatctcttccataaaatgaaattatttgtttaatttagagaggggaagattccactgttcggtataagctccagcccatagttcttttgcttctggcatcttggttgtttcttttggtgcaaccctgatgccccattcagtgtttacatgatgaatgattctctcaataacttcattcatctcacttgctttttcatttttgaggttaaagtattcatactttttgcctccgggaagatcacagatatggattggagcgtaaatctcttcaaaatatctgtatagtgcatctactggtgggtgcgtagacaattgttctgaaattgttttcagcaccacaccaaataaatacttcaattgtggtagagatttgtttttggtattgtccataataagaacggtatagtcgccatcttttaaattttcaatagccaattccatctcttgttttgctgccttattgtcctgcacaataaggcgtgcttgaccatgcaacatacttttgtttttcaaagaacagcgcaaagataattacatcaatttaaccaacaaaataaaaccaacattattttataaataaaaatataatatactgtataatagcataataacatattatttattattatattgatttttataaaataaatatgttatatcaagaaaagcagttttgtcttcttctctcacaacacggtacaacctttgatttgtattaggattatttagaggccccttattagatatatatggccctaatttgatataatcaaagttgttagggtcaatttccataggtagcttgtctctaccagaataccacccaacttttaaattggaatggttaaaacgaagatattgtgccaatatatttatatacttcggatttgcatcaccacccataaaagatatggctgttattcctctgttttggcatatcagctgttcaagtgcttcttgtgttaataattttcctatatcttgtgataaataagaagagtggcacccggcacaagcgcacgggcaaccacttatatttattgccaaagtgatttcattgggcaactcttgaaacacaatttttgtatctacatatttcatatctgcgatttaccatcactgtattgacgatttagcgcctctacttgtctatcacttccaaacgcttttatggggcgcaaatatccaataacacgcgtatattgagttacattgtgacttccacaacagggacaagtatcaataggtcttttgatgattttgccacaatcttcacatttactattgggaatattgaaagtaaaataattggttccattagctatggcgaaatcaattaatttcagatactgctcttttgataagtggtcttccaaattaatatgagcggctgaccctccatctgtgtactgataggtctgatgaccatgtaatataaatttgtccaatactgaagtatcatcgtgggcattataaaaatatgagttatataaattctcatcttctggaacaacatatccatcttctttatcccatttataattctttcctcccagcccttctgctggcacaacttctgaattaaacaggaaaggtcgtttcctgtcatggatagaatgcagtttattttgttctttaatagtgcccaaaatgagttgaaggaactcaatatattctgggttattacttactttcattcccaggaatttagcagcttcattcaacccattgatgcctatggtgctatataatttactgatataaatataaccgccattggaagcggcaaacattcccttgtcttcaaggtcgtatagcattgttttaaaagcaatatgatacttatagactctttcaagaatttctttcaagtaatttttaataaaggaagtgttttctttccatccgccatgtaacccataagcctttgcgcaattttgtattattctattgatattcagagttatcacattacaacttcctgtcatcacaccagtcaagccagaagtggggctaaaagtgttttctgccaattcatttctaagccgacagcatgatgcaaggctgtctgcactatcggaaatataagtaaagaacgagtgtccttccgcatacatttcggcacaaagttgtttgtattttagatcgattatatccttgccattgtgaaccatcgcaaaagtttctaccggaaaggttaatacttgctttaaacgtatttgattaaaccatttcataaacatacgttgtaatgtatcaatagctatccattcaggcttacttccatccggataacaaaattctccaaagagcgatgtgaaatacgtatggtcataataagaaatatttgtaaatgggctttgatagctgcgatttccagctggctgattaacaccccacacaaactgtttaaacgcttttaggatattatcacgcactgttcttttgattaaacaatgtggtgaggaagcttcgcaatccagtttttcataccatttatccccaaactctttaacaacataataattcaatgctatgaaatattcgcctactgccacagcccctttgcattgggaagaaagcaagaaaaccaagttggtaatttgaccactgaaagattgtaaatcgttaggttctgaaggggttacaccatcaatgttgcctacaccttcagtcaatagtggatataaactgacagccatacaatattgctttaacacaggagtagacgcttcatcgtgtgtataaataatatggtggtttaggtctgcctcatattgttttgctacttctggaaatagcatgttcaattcgtctttcatacgttgacgttgaattatccggttggtcgttttatatacctctccttccagatttgctacatttttcatcgttacattagcgttcccatctgtttctgatgaagaagcagcattgtctattgattggctgtattgattcatgtaatcaatacgctctttgacaaatcgtgtatttttacgttgctcacgatataaaataaacgatttggctatatcgtaatatcccaattgcattaacgcccgttccacataatcttgaattacttcaacgggcaccggcttgttggcataaacaagacgaattagtttatcaacggacttcacgatctctgagtcatattctgtatgcttactatcaaaggctttctttacagcattgcctatttttacaatgtcaaaatttacaatctgaccatttcttttttgtaccttcattctatttttctatatttttctacagcttctttaaattgatgagttttggcgtatccacagcacttcagttcgggacaaaaaccacgataaacacatgatggaacacatttgcttacaagaattggatctattttttctaattcattcagcatcagcacccatgcctctttagtttctttggaagcacaattgcataaccttactcttgaaattgccattatttcttgtgcattggcggtcatatccatttcattcaactctccttgcatatgttctcctctgggaatctgtgacccagtacgatctggacgttgcgtatgaacaaacttctcacaacctatgtgatgccgaacaaaatgtactgtcacccattgaggtacttgttcccatgtccattcatattctaataaacgaataggagaatgctctgccaatagcattttagctttccatgaattggatggttctttatcaagtggtggtttgccaacagttctgcgtgccgcatttaatacacgattccaggaagtaactggacttaatttggttactttagtcatgttcttttattttaataatgattattgcagtctataatgagacttaaacgatacttgacttatgatatttataatagccacacttgtctcaaactttcaaaattaaatatatttgagcagtgtggctattataaaattatacatgattttacttgcctcctttatccagcgaagaaaatcaaaagatgtattaaaggcctaaatattagaatatattaggcgtgtaaattactgtttttaataatataagaagattttattcatcaattgatttgcgaaagtaagaataaaatattttataacaatattatatgtattaaaaatatattaatttttatatttaatacatatcaatatatatacttattcatccttatatgtatataataaagttctttatttttatttgtaacaactgcatacggtggtcttagaccatattttctataatctttcagacacctccagtattttgttttccgaaagaatgtatcttgggaagcgtatccaatatgctctattagctcaggaggcggtttgctatactttagaaattcacacacatccattaacaatttgtactctattggagcttcatgcttcattaaaaaacctattcgggtctcatcaaacttttttaaactatacccttttggctttccgccctttttttttgatgacttgctcttcttgctttgtcgtgttgctttcatcctgtattgttttttgaaacaatgctaactgagcattttggcgttgactttcaatgtcaacgcttacattaataattttcataatctaaataatatatgtcattaaaaatccgatgtattctgcgcatccgttattacaatagtctaccacacagttgcgctgtccgcctgaaatcacacaatgccaggagccatgtcccttattatgagaataacctattttgtactttggaggatcaatattgttaggtaatgtaaaaatcacaccattatgatgagtgtgcaattctccttggatggacacgatttttcctatttggcggacatatacttgagtcgtaattccacaattctgaacttttatagggatccagccgctatctttggggtaatctattgttttagctaacaaatcgacaccatttacaaataatttaccaatcacatgcacatcattattgagaactaaatcaccaatattatttttgaaatgcagattcttgtcttctgtattcgagtagcctatataagcaatttgttccgaatttttatctgcccaattaagataactaaccaattcattatctgtttttgaaagagtagaatgtttcaaacttaaaagagaagcggcaacgcttgatattattaccgaaccattaaatgtacattctttgcttttgccaacaatactaagtaccgcacccccctttccatcaccgattatggtatcacggtaataagaagaactgccattataccctaacatattgatatttaaggcccctttattggtcgctacggatgaattatatatatgactattagtaacagttacatttcccccttttataatatcggaagacaatgccacccttaacaccatcccattagagtcaagcgaagccagtaagttattgttaacatggaattgaacagctcctttttctgtaatcgtaactttatagacagttttctcatttaattgagattggatatttagtgcaccagagctactataaaaaacgctggccttagaagttccggccactaaatttactcctcttttaacaaacagttccttgttaaatgttgcgtctccatctataacaatatctttttttacggtttgcgatgggtatggagaatctatcatcaaagcatatttaccaaatagcgcttcctttaaacggagtgcgcttccatcagacgcaatactaataaactgtggcggcatcttagtcaatgtatcattagatactggaatatccgcagatattgcgcatccatacacattacgcccgatcttatcaccggaatcagcgtatgacactctttccacagaattgttttcatacaaatacattggccattttgaagctcctgatgttcctgtaaaataacgtattttcccatttatatacgcatatcctgcactgatatttgtaccagagacttgacacccgctaataataaaattatcgcatccgtcaaatataccggcgaatgccagcgcaaggtcttgcaggttcataatgtcgtcaatataagtataacgcccgcctgtttgtgaagtaaactctttcatattaaatatacaatactttaaatttttttcctgcaatacgataacgatctatataaaaagaaatcattgctgtaaactcttcttgtgaaactatcttggtatttatagttgggcaactcactacaaagcttacatcaccagttggtgttttttcatctttccagcgtaatgggactgatgggtgtccttcaatctcagattcaccttctttgtataaagggaactgattcatatcttcattggaagcttcccaatatatcggaaccccgttcacaacaccatctgaaataacaatgcgttcagaagtgtttaaaaaatatttaccaaatttgcggtttaaaaaatattccatcataatgacctgagaggtcattgctgcttctatgcgtttttcatcagcccatgtcacccaccctatattcaatgaattcaacggctgcaagatagactgaagaaataatattaatttacgaccgcccaaataatgagggaccaattggttgaccaaacgatccatattgatacgataacttctcattctgtttctaattttatcacaaccgcttcccgaaatgtcggcaagttactttctgcaccttgttttgtactttgcttagcatatccgctggacaaatagcattttctgtctattttggttaataagccaagttcgtcattatcgttgtattgagcaacaaataccccctgctctacactggcttctttatctatgtaaacgtctgtaacgtgttctacttgctgaatagcatctatgaccttttgtgaataaaccaaagaatcaaatttcatattctcaatgaactttacaagtgcatcatctatgttatcataaagttcctctttggtaattgctccgtcataatatacggtaagtcttgggaccagtacatcgcctttgcggcttattacattgcattttacaccagcaaatttgatttggttaaggtaggcacgagcagcgaccaattcttcccctgacaatctggacaacgagctaccctccccagtagcaactttcaatattaaaatattgtctttaaattcttcactataatattcttgataagacacatgagtaatgattctttttgcaatgtcttcagttgcataatgaaatgctgtaccttcatcattaacaaccaaatcatcaccatattgccattttaacatagcattggcataatacattggggtaccattaattcgttgggtaaaaatttttgcaatatctattgtaaaaatatctaacaatgtctcaaatgaataaatagcagcagctgtaacccaagtaaaagaattgataattgacatctttgaatcattggtcaactctgttaactctaaatatttatttcttgtttctacagcttcgttgtatatttctgttaatgtgcgactcatgctatatctgaattttcatattgataaatagttccgtttatattaaaaagccatgaacctgattcattccatgcgggttcatgagtgatcacgtatatagcttccattccggttgttattatataattccccccatcgtcccttatgggttctttatattctccagagggctgtatatctaatataaccttacaatttcttctttggttattgtgagttgcaatatatattaggtaatcattaataaccgatttattataatagtctatgtttttcaactctaaaacttccaaactcatatcttgtatagataaaagactggatatgctcatattagacagttttactaaatatgtgcctttaaataaaaatagcccttgtagggatatattgttcttttctgaaataatttcatctacaactaatggtgtagtaggcataataagcccattgattgtagacatattccaagtttttaagttaaagtcaccgtacaatctaatctctcttttttcaacaacattatcaaagaagtgtgtgtatgctttgtcagttggctctaataatatgttttccaaatcgctattatcaccccaatctacaaccatacttccatctcctgatactaacaaagttattgaaggggaatctggagatacacagataacgcaccttagtgtagcacttgtctctttaaagtacacatgtctttctccattaacagggataatatgttctgctttcatagtatttactatatgatcatatatagcagaaccttcatcccaatataattcgtcatcttcttttaatatcgaagaaaaggatagttcagggttattagctaataaattaaaaaccccttcaatggaaccatatatgtttaaagcaatatcgaatatattttgattattttttactttatatatctgcatctgcttctgaaaaatctaaatctaactccagatctcctgagtaggaattaaaggcagcgttgatgacattaaccttatcatttttgaactctgtttgcaatttttctgctaaacctgagtgggctaaattagcatggaggtatttaatcaaccccacaccagatgtcgggtatctataattattagaaggaacacactgtagtaataagtttctattttgaatattggcattaatattagccatatcagaaattccactggcccacaaatatgctataccttcatttagttggatacaataattatcttgacttataattataaactgagaagcgcataaattcaaatccttaaaaccaaataatttcgtatgcacttcaaaccattctgaattgtttgtaggattaacaattacacgttcgtttcctccactaaaatcttttacaatacatatccttataggcttatatactggtgtgtaaggtatttcaacctttaccccaacggtatataaaagattagtattaaaactggatggtatggttatttgagccgttaaatataggtctttttcttcaagccatttaaatgaatatttctttgccgcacctttgctttgtagaatcatatcatttgtggctgtatttatttgtatatcctttctcatcaatataggtaattaaaagtaaaactttattccgcagtttgtactatcaatataccaaagaatagcttcttgataaaatatttgttgatttcagcttgttatcttgggtagaatatcagtagaacctataaaatctacccacattctaccacacggctaaaatcaggtgtttttttcttccttttcacagccttcaaatcacgtattatcgtattagaaagaacctctgaatacacctccgtagttctgacggaagtatgacctaacaacttctgaacggtggttatcggaacaccttggtgaacaagcagggtcgcacaagtatgacgggctgtatgataggttatgtgcttctttatccgggctaaagaagctatctgtacaaggcatttgttcacctcggaattactcccaaaattggaaaaatcttcaatattatagcggtctaagatagccagcgctttcccctcaaaaagcaaatgtagcggaagccttatttctacgccggtcttgattgacttgaagtgtagccactttttaccgtttatcttgataaaattggatgcagtgagctggcagaagtctgaaaaacgaagaccaacataacaacagaacaggaacgcatccaacacatgacggagcttcttatcttctacattcaggttctccagcttccgcagttcgtccggagtaaggaactcatgccgtcccctctcctgttttattttgtatttgcgaaatggataagcatccgcatggatatatccctgattaatcgcttcattgaccaaggtacgcagctggcgaaggtgcttggctatcgtattcacgctattgcctttttcacgcaggtaggcttcgaactccttgaggaaagtataagtgatatccttgaagtccagtccagggcgaaattcctgaagtacggttatcgttgtcatcaggttctctttggtacttcttttacggtcggattcctgcacatagattttggcaaatacggggaaagtgacattgaccggcttgtctttctttatcgcatctttaagtagtgatagcgttacaggaatgccgcgcttccataaggataactcaatcgcttgcaggtgtaggacaaactcaaacagcatcgaattgaggtcatgagcctgtgggtgattatcaacctgagcattgcgactattccaatgttccggcttgagatacaaatttgtacggaaataaactttcctctgattgagcaaggcttctacttgcactaaggccgttccctgtttgtttagctgtttctttcgattatacactaagcggtattttattttatccatttttaagccaaatgtacttttttggacgagaagctgcaaaccgatgtgggagaactgctcgatggtggagctatcaaacagaagcggtctgacctcaaagatgccgaccaatatacaacaccaggaacatacttcgtaaacctatggggcggagtgtggcaaaatatgccgactaacgactgttttggtctatttgaagtacgttcctatgacggttatataacgcagcggctttcggccggcaacggaaaggtgtttgtccgtataaaagaaggtgaaaaaccattcaagccgtggccaactgccgcacaataacccccgttatagcttctccgttatctccgtgaagctatcgtcgatgatgtccggtgttccgaccaattggacaccgtgaggcgataaaatatacgcatgattaggtaactcgttattgaatgtaaatgatacgaataggtcacgtccttttatgtagtattttacttgaagcggcttttttaaaattctttttaaggaagccgccaaacctgtatctggtatgtatataaatgataaaaagtccatgcacgtatcagcagaatcattgcataagaccgctatcggggcacgataccagtcagtcacattgtctgcaatcttatatacagaatcgtaagcatttacaaaatgaggatataccttgaataaatccggagataacaaccccgctttttcaatagtagttgtaccaatcagttctcccacgtcttcaaaaccggtgtgggagaactgataccgattgcgacccttaataataatggtctgtgggataaaaaaatgacccctcgtttagttaattataaaagtaggttcatggttgtgaagaatgtttgtgtagtcaacttattggtgtcaacccggcacgcctacgctacagataatatattagctgttgtacaggttatatatggtatggcagatgatatttactctgttcattaccactacttaattcctaaaaaacatgaagttgttttcattaatttaaaatataaaaaaacagaagataaatatctgaatctatatattgacagtaatgacccggtgatttcaatactatcggtttcagacatctcatgtgttgagcttttggatgaacctatttccgaatttccacaggatacaatagatgccgttgaagtatgatttgcttgttttggccgggaagtacagttcccgaccaaaaatatctgtttgttcttttattgggttggtttatcgtaatctatgaaatctataaggtcggcaggttcttcgtttaaatttttcatggtagacagttgaccaggccctacattcatttggaacaaacaacgtttaccaaatgaagtatttgagacaagatagatttcaatggactcttctacaactctgtatttcagtgtagagaatgaagtaaatggtatgttatcttggctaacaattctataatagcattttacattattactatcagctccaagaccgccaaacacatgtatcaaactcattccttgcaatgtcgatgaaagacaaaataaaaaagaaaagccattccatttgcggtttatagttttatgtagaaatacagctttattatttgctgtcatcagcatattcgggtttatactttttgaaataaaaccatccttttcatctgaaactgttggcatcagttctcccacgtcgatttacggatgtgggagaactgatacctgtggctacctttcaaaagagtggactttgggataagaaaatggttccacatcctaatcattcaagatgtttatttatggttgtaaatcaggaatgtgtagttaacttcttggtctcaacccgacacacttatgttgccaaaaacatacttatcgtagttcaagttatgtatggtgttgccgatgataagatttcagttcgctatcattatttaatgcctaaagagcatgagtcagtttttgttaaattgaaatataagaaaacggaagataaccgtttgaacctctatattgacagcaatgacccggtagtttcaatcctatctgcatcagatttctcgagactggaattaaagaatgaactaattactgaattaccccaggatgcaatagatgctgtcgaggtatgatttggttactttggtcgggaatataacttcccgaccaaaataattgattaaatgctttgctgattgaatgtaaaattgttccatgaggaccaaggcccattattccaacttacccgtatgcaaattgtttttccctgtaaatcaacacccgtttgaatggttaaagtcttagtattaaatacaagtaatccaccgtaattgaatggcatagtggtagaattccccacatcatacattccacttgtacgtatgtcatcgggggacatttctccttgaattatatcacgctgcataaacgggaaaagtcctaaagatgtgaacagttctcccacaccggtgttgaaggcgtgggagaactgatatggaaaaaactacgtgttacaaactcttttgcaatccattatacccatcaagtccaatggaacggagtaagtctcaatatcattggcagccataatttctacaacgtaggggttcgattggcaacctacgcaaacaaagtaccttccgatggaatagtcggagagttttattccataccatccgggtttaccgatataaaagtggtttataagaattgggatgtttacgtagtattcactgtagtacaagggcaatctgtttactttaaatacgattgcagtacccaatgcgatataattaaagatattggtttcatagacgaatcatacaaggagataaaacctattgcacaatagtgcaatctgccagtccggtaatttcatcatcttgtgtagccatatcgtacattgaatctctaactatcagttctctgacaatagttctatcacctaatgaattgtccgaggtcaagtatatggatattctatggtcagtttcgtatttcatttttaggtatgtatcgctattgggttgtccatataggtatttgacatatacttttgtagaatcttgtaattccatagtattaccagcaatgtaaacgcaaaaatcacttaatggttcacctgtggatatacatgatactctgatagcaaaaggagcccattgggaagatgatgaacggtatagcaatacgctacgtttgccttctgattttatctttgttgttgcaaacttggaattacttaatccgtctttctcaggagttacaactggcatcagttctcccacaacttgcgccaggtcctctttattgattaaaatcggattgccgttcttatccaaagcacgtacataatttatctcttttttctggggaagtgcgctttcgacctccttcatcgtttttatagctcccatactactatgatttttaaattgaacattattttaatcttttctgaacaccacatcctgaatcttccagttccaggtcttatcgtccttctttccgctgttatggaaattcaaggctgacttgatgatgttctccttcaaatcgtttttcttgaactcgacttccgccttctgcggaaattcctttacctgcgcggtatctaccgagataaccagcgcaaccaataatgtgtctaacataatcctttttattaacattaataatcgaataccaatctccttaatacgctgccgaccgctatgccggcagcatccgcaagtatgtccagccagtcccagtcccagcccgaaccgaccttacagttcttcctgtacatccagtcagcggcttctttcgtcacgcctgccgtaacggcacagagttcacccgctgtcagcgtgatggcaaggcatgcaagaaaatgcagcagcttgtcgttaattcttgaaaacatatccatacaatactttttttaattacgcaaccgggaatgccataatactcgtatctgaaactcccaatacattccactgtgcccatgcaccacctatcgatgcaatacattccaaatgagcacagccgtatgcaggaatatatataccggggtcgccacttccccatatctttactttcgtatcactgacattaaaaatggtgagtgaacgcccgccccaaaaatcgtaattaggggacaaagccacctggggtaagccaccggtcagtaccatgtggtccataaaggtatctgccgtatcaggaagtttccacatctgcccgtttccgacaatatcaggggtaacacccctctctatagtgaccttattcaaatgcacctttcccgaaaagtccacatcaccttcctttgtccagcttaccgctccattggctaatttcccgcttccatccttattcagaagggttttcccgccggcaatattgacactaccactttttaaatcacctgtaaaagttccgtctgcaccatccaggtgcttcaccttcaggttatccacgtcgataaggtctgcgtctatctttctggcaagcaaaagctgcgtacccagtagcgggtattcctggatagatttccaggaagtagtgtccgggttctgggccacgtcaaagaacggatgtttatcactgtttcccggtacaggattcatccacatgaacacaaaccccttctccttatccaggaaatattccccgttcttgtatttgaacggcagcggtttccagtcaccatcaaccgggaacggggacgggttctgacgcacaatgctggccctcttctgagcaagaagggtctcgcgggcactatcacgatacgcttccacgataatagaatccgcattgccccacttgtcagacggaaggtagtattcccattcggacgatgcaccgggggaatccgccgtaccgaggtccttgccggccgactggacatgcagccgccagaatacatccagaagggccgcatcagccccgctgcggtgcagggctttcagcttcagcggtgtaagctgcacattgttacagtccacagagatggcagccggctggcactcgatgtcaacgtattccaccgggtcaggctcgctgacagccacaacactcaaaactgctgtcaccatcatagctcaataggatttgtattcgttgctattactctgaatgtcttggcccgtgccgcatccgtataggtcagtgcgatgtccttgccctggaacttgttactatctttgccagacagcgtaaacggattattctcgccatcaaacgtggcgaagtcccagcttgccaccgccacctcctcaccggactgacgtttataggcatacggtgtcagcgttcccgtttctccaggatatatctgcccgtcagaagcaagccccttgaccttgaatgccgccagtatagggtcgctaaggtcgaacacggtaatgaagcccttggcaatgactttcgcattctgcacagcctcacaacttaccaccagcgaaccgtcaatatcattcgcggcaatgttctgggttccctgagttccgaggttggcctctcccgatggcagttgcttcttccattggagcgtaatgttccccaaatcgttgataaggtctccgccgctgtacagcgatgccttcaacgtcagcacttcggacggattgattatctgcgtacccttgtctgaagtgatgaataactcatactgtttacccgatgattcctggataacaacatccgtcgcaagctcgttgaatgcgaccgtatgcccgccgatttcaacttccccggaaacggttatgcggtcattgtcatatccggaaatgggtacgaggttcttcatgacgcgaagtcccgtcatgggataggactgcgagtccacacttacattgtatccggttacgcgtttgaaagtaccggcaaactgttccgtattgcacagcccgtcctccccgaatgcaagttcggtaccgttgtacttgaaaacaagcctggaaggaatgaggatgcgcccgctgctcacatcccgcaatacgacgatgacaatagggcgtttgtcctccgccaacgcttcaaaatccggtgtatacttgtcacttccctttgtccatgcctggatcagaggtccgttatccacgcgtacatacccgttgacggttgttccgttgctcaccgccacgatagccagtgaagcagtcacttgattctggttcatcgtccgcctcctttcctttttccgtcagtctttgccccggccggttgttccggaccggtcacgctgccttcaccctcttccgacgccccgctgtcgctatccggattcggctcctggctgaaaccggggtctatttcctcttcgggtgtcacactgaaaccggggtcaatgtcctccgtaccctgcatcgcttcctgctgtttatcaatcaactctttcaactcacgtgcagaaccgatgatgtcgatgtcaagaagagtacccacattccgcatctcactgataggaatatacaccctgccatccggaagggtattcattatcccaaagaatttgccttcgagctttgccttttctacaattacgtacatattgattaaagtttaaagttgttactattcatataccgaacccgtggcaatgaataccgtctgtccgtcaatctgtgaggagataacggcgccttcctcatcgcccatcagggactcacctgtgagaagccccacttccgcccacacctggaagatatgtcctgccgggaaacccttgtccgccggaatgaactccaacgtccgcccaccggttgccagcaccttctccggctcgcccggcttggcactctggcctttccaaatgatgcggaaaaggtcatcgtactctgtaccgtactcgcggcggttgtcgaagatgcgtacctcataggcgctcggctgcttcatatcatcggaaagggtgaagcctttcgtctggataatttcgcaatttaaagaaacggccatctccgtctttacctcaataaccttttccagccgcccgtcagtaggagcctgcggtctgctgcccgcatattcacaggcacggcaacggaagcttgcgccagtgacatacttcgcctgatacatcagcttgcgggtgtacactccgttcccgtcatggcagacgatgccggggtcatccggcgtaaccgggcggtatgctccgtcttcaagaatgtcccagaagtatgcggcgtgttcatcatccaccggttcagtgcccgtatagagctgcggttctatctccttgtcccaataaccggaacggtcggccaggcgaagcgggtcggtcaccatcacggagtcacccttcaggcgcaatgaatacgccttgttgtcataaaggtgcgcataggacttcacgctccgttcacagcggacctcgcggttcgtacgagggtccgtgaatatcgcgataccgaaatactccaccggcttctccggcggaatgttcttccggatggtaagcgcatatttgggcacaccgccgctgccgtctgaaatgctgtaatactcaccctcgacgatgcggttggccgacttgtcacggggtgcgccctcgaaccactccacccccgtgagttccatttcaccgaataccgtcttctcgtcgaatgccgataccttcggcacgatgaccagcggtgtcagggtccggtcggggctgtattcccgcagttccttgtcatacgtctgcacaggactgcccgacaatactattatctctccctgaagggaaaggggggcaacgtaaatacggccccactgcttgttactctttaatcccatatacctaattcttatacgatgtcaaatcctaaattcatatccactttctccaacctgccatttaccggaaagaacacccggcaggtgaatatcacggacttgctgacaaaaccgaaatccgaaccgaccccgtgctggttcccgttgtcgatatggatggcaagcctgtttccgtccacatactcaggcgtccagaggttatctgccggaacattgccactgttgcggaaccactccacttcggtagcatcgtccgccatcacatcatccgttatgtcaattgtaccataaaaaacgcgcccggacattaccgtatccacaccgcctatgacgaatgcctccccgcccgaaagggagagctggagcgaatacctgctgtcaccctcaaggagtccccatgacggggagttccatttcggttcgtcggttgtcttatctgacagacagccccacttgcagccaaggtggtagaccgtatgctgttccagcagggtatattcgctgccggaaggcttcgacagttcgtgctgtacaaaccggtaagaagcgccgctctgggccgtttccagcgaccagacaccccggtctaccttgttgggtatgacatcgccgttgtggtcgagttggtagaatttctcggcaatgactgtctgtgccatgacgcctgtctcattctcggaaatcggcagcttttcaagtgccttggtacggggaaatctgccgatgctgattgagtagttgtagtcctccaatatcggcttgtgtatattcgataagaataacatactttgttttcttatatcgaatttaaaatttctggaccgttctaaatcttcaatgtcagcatttccgtaaacagatacaagcatttgaggcataggctcgtaattaacgcctcccggaacatcttcatttggatacattacaacagtgatcgtgttcacagatgtagctacgtttgtaatacgaaaccatgaaactatcggactattactgttaacgcacccccagcagatgtctccaatatgaaataggtcaatatcatttgacaggttgtaattaaattttaaattataactattgtcttcatttttatctacagccaccaacattgcggattttgtagatgtgatattggcttgtcccttactgttccaactaatacacccatgtcctaatgcaccgtcaccattactgtttaaataccaactgtagcctctcagacctgttttcccaattgtaatatcttctggacttgctgtggttccggtatcggagaattgacccatgtatatggcatcttcttttattgtccaatttgctatttttccagaagcggattcaatttctcctttaaaatatgcagacccatcttctaaaaatcgaacattgtttttagaaaatattgccttaccgcttttgtatatcccccataaaacttctgcatactcattttgagctattatactgccctcagcattaatggatagctttaaatcttcagtacaaattttattagtatctattacccagcctgcaattttcccctcacgttcattaatatgaaatatgtcaatgccttctttatatccgtaaacgcctgccccattgccattaggacctatataaacccctgtgatatttgttaacccttcttcattttctatttttttaccaacaaagatttttggtgtaatcaatgattcgccaccaatcacagttttattagaatcccaatcatcaatccaacctggagtatttgcaatgttaccccatgatatagtgacatcatctccaagaacaacatgtccattatgatcccattctatatttttgtttgccaaatacccagagccatcgtatccaagaaaaaacgacttatttttagtaccaataccacctttcccatcaaaattcagttgtaataatggattttgaattgttccgccaatccctcctctattgaaccatgcgccataatcattggtttctctcaatatatcgtctgttggttggtattgggtagctgtattacctgactctaattgtggagcaacaaaataaatgtacacacttggatcaactaattctggaagcaaggaaatcgttaagtcgtcattctcttgtggggactgtaactcaaaagagattttgtgtctttgccaatataaggttgcactttcttctatttgtatagtgccaataaccttgttgttttgaagtactgagagctgtccgccagcctcagcatatagccaaaacgataaggtataagattggcctatatttttcaatagccatttattggtctgtgccctcattgtggcattgccatcaattttatacacattacctatacctgttgggttgtcaatatgatcatccgtgattacaggtgttgtaaactccacattcaatgagttaacaaaagtatttctatgtatctttcctgcataaaaggttgcagcaaatccgttttcatcccctgctgttaaagttcctgatatatgagcagaaccagaagcaaaaagtttttgtatataacttccataactgtccaactgcccaaaaacagggtcaataatgccggttagctttcctacgcgagtgtgacaagcatcattaaaattggtaacactggaaagcaaaatgatgttgaagtccgctatccatacttcatcatgtgctttcatggaagatgtatccaattttagagtacgcaaataccttcctgaataatcaatggtaacagcatgtagtttgtattgccaatctgtagtgaccgtataatcctcttctccatcaatccgtgtgccgtcctgaaaacccaaacttatcttgcaggataattcacgggaagacttgattttataagaaataagcactctattgggatttttgacgtattctttgaagtcttgttgaattccaataaagttttcatcctcggtattctgtcgttttaaatggagtacccgatagttatcctctattgacggctggtaattgacatctaccgcccccttcactatatactgagattttggattggtataatcttttgtagctacattttcaggccaacacaagctggcatttcttccaataccatctattacatccatgtatggtgcctggtcatcagagcctgtcaaatacatagccccagaacgggaagtgtcaaataaattggtgatacgtgcaaaatccaatatttgctccgattttggcacatctccttcgagcaatgctcctataaaataattacgctcaacagttctgccggttttaggatcaagtacctcttcctttccgtaatttaatacacacattaaggaataaactaaatttttaccgtcaaaatattgtcttctgattatatctccggtgcgtaatccttgagttttttttgtgtcgtgttgaagagaaattttatattttttgaatgtgtatattgccatttatactatttcttctaccaagtctccggaacaagagtcactgacccacaaagacccattagtaacagattgcttttgtacttccaattcatagaatcttgcttttttacgaattgtaagcccatcaaatgtcgcttctatattgccagtcaataaattttgaataatcccccaaccgcttcctgcaaaaccactggagaaaacaacggagccaatattgttcacaaaataggcatcaccgtaatgcttaaccccattttctaaagccagccagtagattgaatcattaaagaatagttcattgtcaagaaggcgggttttagaatttgcaattcctattgatttttccccctcaatggctttattaaaaacaaagaaatcagcatctgtagaaaatttaagactggacgactttcggtttaacggtgcgtataaacttgatgattctatatagccgaaagatgactcttttacttctattgttgaggtgacattgtctccagatccttgattatatttgaatggagcctcaaggaatatcgtatcaccattactataaaaccctggtccgtcttttgtattgaatcttatgtaacgtttgaaaatcaatcctgcatcttcggaagatttcttatatgtctcaaccaatacatttcctaatccatgaccggctttaaacgatgcggggaaataagcagaaccgaactttgaaatcaattcatattcaccgtcatcatcgtaaacactggtttgtagatttatttgtttggtgccatcatccccaaaatttagaattttatcattggcagaaaaagatatgatattgctgttttttgcatgaataacgtaatttccattcaactgtatccctacccatccaattaggttcaaatcgccccttaactgggctaatcttggagctgaaacggacaatacatctgtaccttcaaaccctaatttaacaccatacaaagcagacactgaagatccaaaaacaccgtctcctgatacagataagtttcctgcaactgttccgtctttcatggtccagctaacatcttctttgttagagttgccggcatgataaaagtcataatctttatacttaataccgttattggaaatctccagttcttctaatgtgatgcgcccactgcacatgacattaccgtccaataatatattgcctgctttaatggacagtatatagttctcatactttagtatattcgcattattgatatacagtccacatgaagacaaatgcaattctccatcaatagagacgatgcttgtctttttatcttggttaggcttagaaatttgatagacatccagaattttgatgccattaaatcctgccgcaaaaccatacaaggcgttcaatttccccgccatagaatcaccgttgatggaaacaaaaccgcctccaccttccccgccatcaccgtctcccgtcaaactaccgacaatcgtatttgccaataaataagcagcgttttttcgggtaatatcttcataatcacttatttcatctttaattttctcttcattgactacatatccatcaacgtactctggccctgtaaaatcagggagtgtttcgtgagatgcttgctccatacctgacacgaaacgattgtacattgtttccagtatgctccccttttctatttgtgatataccttcatttagttttgccattattctgcgacttttacggtttttgataaaaatcctgatatggatgccttatatgaattaacttttgcttgtagagatacaaatttggctaagttggctggtggctgaggacccatcattgttggtgtcatcatttgggataatgttcctaaccaatcaaccaataaagttgctaattgatttcctaatacgccgggttccttagcacttccactacccaaatacaccccatcctcttttattacaatttccttggcattgtatttggccaaaatctgtttggcatcaagaagtatttggcttttatcatgctgagatacaatgttatcagcagtgacttgaaaaatacttttatctgattcattatcccccttagctacctctgacaatatagatacaggggtgtaagtggtgtgcgcatgaacccctgtcttttccagttcatctatatcaggagagtcctcagagtcctcccattccttggtttctgtgaccccaataacaactttattgtgtgcatctatttgtactgtgtcagcatgagaatattggataacgtattcacgcaatgttgcggggtctgttgtgattactacgtctgaataaagataagggataatcaccataccgttttcattgttttggatagcagaaaggtacaccccttcatgcaaacctaccggcaagccattttccaaagactgttgctctgaaaggcttgataaatattcttgtacatccaccgttccacacagcgcatcatcagcgtcagtatgaacttttacaacgtaacctgatattttagatgtgtttttcattacgttggtacgtggattaactaacttatgaaaagctatttgcctgattgcttcatagatagtttcgtttgcgcttaaatcgtttgtgatgtgtttcatataattattctttttcgggttttgctatgcaatacggcaatttcagggtttgccgaaaaccactcactccaaatttcgtattcacttcttctacacgataccaaccgtttttctcaggttctctgaaatctaataactcaacttttgcagcagctttaatgtttagatctccgaatataaccaaggttccatccactccatttcggttataattctcaaaatattcttcagcttcctgaaccaattcgctttctgtaacacctatttttctggatatgtaggggataacagtgtatttgcttaaatcaacacggtctctggacttggatttagtgaccgcccccaacttcatagcttttgtactcagtttggtttcattgagaagttgaaacttcttgtgttcggtgtcgctgcttccagtccattccggatttagccttatagttatactatatttaatctgctttttcccttccattcggaatccctcggctgaaacagccagatatgccggatctacgttcattagtgtaaggttgtcatttgccacatggtaattgaattgaatcaatgttcccattgatggttcgctgtcgttctctataagcatgtttttgttcttggaaaagggcattccaacctttatatatggcttgtcgttatcataacagagaaaacaatacaaaccatattttccccattcggttaatacgtctgctatcgtaaggtcatcacttaattggatttttccgatgtttatttcctcttttaaggtatctgggtgtaactccaatcctgtgcctttcaatagatcgtactttcctccagccttcaataaatctgaaatggtagcattgtttatcaggatgtttgggcaagtcttccgtttaaggttactcgcaacactttcacatttgatttctattggagtggagacgccacatttgacaatatatccatcaaaattaggcgcgtgtcccaacgcttctttttccatttcttgctggcgggctttttcattcgcaaatatttttcctttgtcccggtaatatcctaaatatatacggattcgttgcccaactttaaagtcttttggttgggccactgaataaccgggacgcttttcgattatcgccccatcgttcaaacgttcggtgtatatagaagtaaccccatcttcttctattccattagctgtaacagtacgttttatcacagtccctcttggaaatcttacagaagctgtacctataagttttttataagactcttctatttctatactttgacattcacgcaataccaggcacttgttctcgtccggatcgctaatgtctataacctgtttatcggatggttcccaaattataattttgcataccaagatgtccaatccgtcttggtatgcaattgcattagaactcttcataattaaatcacatttgatgttaatgtttctatcatctgagcggcctgattggcggcagacgcttttacctggtcaagcaataccttagcccacccctttttattcatttgcgatatttcaatattagttccattgatagtgtcttcaacgacttttaccgcatcatcaggttcaacggcaacacatgtgaagctgtatggctgaacattcttgaacccctttttctgccccatattgaaatctttaatcagaatttgagtaacattaaattgctggaacatcaggttaaatacctgaataacacccttgtgttgcattaatgtaatgaatttggatacttctgcatatggatatacgtccggataattacttgtaatttctcctgttacagtgaaactaacgtcgccccctgaaatcaattctttacgagaacaatctcgcccctgcaccttagtaagcacgagattgttagaactctgtgcctgcacaatggctcccaaatccaagaacaccaattctccaggcacttttacctctgtagctgcatttagcgaagaactggcagcagcttcattacttagcccctttattttatcccaatatgtattaaaagccgttgactgtggctggccgctctcgtttttaatccaaagaagtaatccctcgttcgccggctttccccgatactttaaagttaccccctgcttattaaaggtgtcttgatctgttttctgaccattctctatgattttttggagttcttttccctgattattttgataagactcagcagttttttttctgtccaactggcgtatatatttaggataaaggtcattgatggtggcaaaagtcatctgcatcattgttctttttgcagcgtacacaaacacattactgtatcctctattggatataaacttcaactgaccatctctttttttataattagcggcataaaaagctgcatttatacctgtatgcgctaacccattgccgacatttattgttaatttagaaaatgaagaactgacaaaactcatattatgctatattttcattaaaatcttgaactacatctaacaaagctgcggccatttcccgttttatatttgccagtgccgcagactgcttctcatccgtcatatcaatggtttggtgatcaacgcgcattaaattctcaatacgtaccaccatttgtttgggagcggcattgtaattattataatggctttggtattgagattggtccgaaccattatgaatactggaagccaaatcttggtctgttgtcggactcaattgaaaggcatccttgcctgatttgggagtatatattttcccggttgtatctacccattgaggggtagcgtatggagcaaccgactttgatacatactttacaccaccaaagattgcagtctccccttcgcccttaggtccataaaatccaccagctggcagtacatccccttctttcaaaagattctgtataggcgttcggtttatgaacggggcaaacaatgatttgtgtccggaatataaatcatcataccaggaaagcaatcggtcaaatgtttctgtaatataatcaacagcggcctgttcgctctctaaattatatttatctggattgtttacaatatcctgcacgcgcttggtccaaccttcggttccgaacagcccttctgtaggatcaaataaggggccaaacaatccttgtaatattctttgggttcttatagggtctatggtttggccggattcaaaatccctaagaattgaagcataatcgttccacgcactaattgttccctgcataatcttaatcaggtgccgtatatacgcttgtgaacggtgcacgtccccttcagtcatgtcatcgtggaatgtttctgcactaatccaatcccatttaggatcccaactacccattttaggaataaacctgtctgcggcattccttaatatattagacaaatccttggaattgcgagcagaagtggctgtgtgcaaaagatatttgctcaaatccagattctctttggaattatggtccgccaattgagccagcatcatttgaacggctacctgttcgcttatttctccattactcgcaaaaacatttgtatttgtcccgcttaaagtacgtccgtgcaattcatacgcataataattttccccgttcaatcctttttggaaagtctgcttcattcccaaagcattgaacaatgagcggaaagttttatctacgcctgtccattggtctgcggcttccaatcgttgtaacaattccggatctctgcctgcggctgtatcaaagaacttggtctgatcatccacgctttgtttgggaccgttcttttctatccaataacgatgccataattcagtagactgggcaatacgctcgttttgggttaacaattcgttattgaatatgcgcatattacctatcattaaagcatctgggtctgacagtttaagtttgtcgacattcaaattacgataactttgtgcccatgcttcattggcctggcgggcggcttctgttattttatatgcgtcatcaattttagaacctatataagtgatagctgctcctaccataaagctccagcccataggtttggttaataaagaacgcgtaattttttttataattccccatagtgttgcgccacccatttgggtaagattatttattgttttaccgccactatttgcaacaacattacctattgattctccactaacaagccactgcttgattttacctccaccatacaacaaactaccacctaacgtattaagaatagcttttcttttgtttaaaccataacggctcttttctatattatatatccgtaccatatagacgagagcagtaaaaagaggttttaaaaggaattttgataaccaatctcccataaacactgcacgtaccatcaacacagtgcttaatatgctctgcccgattcccgcaacaacacctgataccatttggatttttataaaccattgcaatgctgttctaccccaattgggtaccaaattccatatgatcataatcttgttaaatacgtcaacaattacattggttattttcaagaacatatccattgcgtttttcaatgctgtggcaaattggggagatttcatcaactcaatcattcgttggagaaaatcacggattgctccctgcatctgttcaaatccctgcattccagtttccgtaaatgcggaagtcatctgataccacagaccctgtatggtgtttttcttctcatcagccaaatttgaagcaagccccattgaatttttgttgagtccggttacttcttgcacctttcccacattatttatcaatgccaacgcacccggcgctgcggtaactctgaacattttgttgattaatgttgtaaaatcaccggaagtcatactttgctgcttctcatgcaattcgctcaaaatatcagtaaaattcctcaggttgccgttcttgtctttggtactaatacctaataaatcccacgcttcttgtcccctttttgtagggttcatcatatttaacaacatcatacgcaatgttgtacctgcatgagaacctttcaaaccggcatcgcccaatacacctaatgcagcagatgctgtttcaaaatccagtcctgattggtgagctaccgtaccagcatacttaaatgattctgccaactccaacaatgttgtgtttgtttttgtgaatgtcattgtaagaatatcggctgtgttatccatttgctttgcggggatttcataagcggtcataatgttggttacaacatccgctgtctctcccaaatctgtatcaccaacaagtgcaatatctgatatagggcgaacggcttgttttatctgatcaacatcaaaacccgccatagccaagaatttaccggcttcagcaacttgcggggccgtatatttggtttccacaccaacctggcgcatgagttggttcatttcgtcaaatcgggtctcgaaacctatatttttatcgtgagcctgaaggatgtttttagtggtttgagttatgttatcataggcagaagcatccctaaaaacagaagttacccccgacattaaagagctgagtccataggcaactcccatgcccttaatcatttctccagcaacatttgttcccgtattagcatatgttggccccaatacctgtcgggtagacgggtataagtaggtactgtgtccagctcctgtttcccttgccatgcgtacaactgggataccggctctggaggtattgctggaagctgctttggaggctccggcagcgcttgctgttatggtaatcctgctatttgatttaatctcattaattttcgccaataatttgtcgagactttttatggcgttatccgtattagcctttggctgtattaaagtaccgtttattgaattgatagtattgtgaagcttctttatatccgaaaatgaatacaaaggcttacttgcagcccctcccaatacagcttttgactgtttcttgattgcctccaggtgccccaatatacgtttgaggccttgctctgctacgctggtattaatttttatatcaattggttttgtattgatagaagccaatgcagagttgactttgccaatgctttttgcaataacatcaaagcgttttgtcaacgcttccatttcagccgtggcttgctgaaacttacgtatagactccaatgctgggttggagttcacgtttatctgataattaacgatataattctctgccatctttttatgttttctaaagaatagcgatttgataccttgaaagattgaaaaagccccttatccaattgtgaataaggggctttggtaaaagatgggtaacgagacgctttatgcaagcataccaagcgcgtttgcctgttgagttataagcattttgctatgaagccatgcggcttcttccgacagtatcgcaaactcttcatcgtctaattcatctatatttacgctgggaaaataatgccgtatgaatatctgtctgtgacggataaactgatcgtctcttacttcccagcatttgataaatttacgagtcttcctttgcgcatctcgataattttagccaaatgaggcataagaccgtagataaacagcgaatcgtcttttatcaattccttgtcaccgtctatgaaacagtcttttgccaattctcgcatggcaccggcttggtctttctgggaaagggacagatacttgctgaacgccgggaagggtggctgcttaaagtagccgatatagtatggcttttcgccttcatcttcatctccctctaccaaaatcgggaatacacgtttcagtttggggtccgaatctttcagctcttttactttcttttcaatctcagtctgaattttctcaggcatgaagaaatcgtcgttttgattttccataatttctattgattaaatatttagtgtcttttatctatgaatagaacaaaagaaaaaagatggttgcctgattgatgattttttatttttaaatgctgatattttgttatttagataaatctcaatacttttgtgaaatcatttgatttactgatgagaaaatacgaacagaaaaagttgattcaaatagcattatatgtgctacagaaaacaggaggcattgactattaccacttgttcaagattttgtattttgccgaattaaaacatttagctaaatggggagagaaaatcatatctgatactttctatgctcttgactacggtcctgtaccaacactattgtatgatgttgtcaaaggatacaatatccctaatacagacttgttagagttgttctcagacaatgttctttttgcaggtaaagatgcgcctaacgtattattacctaaatgtgaggctgatatgaattatatttcaaaatcagaaatagaggctttggatgcttctattaatgaaaatgcgcatctaacttttggtcaactcaaagaaaaatcacatgatgatgcttggtacgaagcataccatcacttaaatggttcaaatgttatttctcctataagcatggcgaaagtatctggagctgatgaagcgacactggaatatataagagaacaaattgaattagaacaagcgttagcatgacaatcctctcagaacttttagaagatgattccatacaagatattgcccgaaagacaattaaagttggggatgtctatcgtataaaaatgaatcaacaaaatggaatcgtaccaaagaaaggtgataactcacgtcataaattctttattgtgcttggttttgattgtgatggaaatgtatatggcggtgttattataaactccaacataaaccagaatgtaccacaagtggtcaaagattggcaaatgccaattaaatgctctaaatattctttcctcgaatacgactcttttgtagattgttcaaaattgaaatgtgcggaaatagaaaaattcaatacttggaaatatttgggctttatagaactggaagatgtggaattgattattggtacggttaaagaaagtcctaaagaaacgccagaacatctatcaatatttggactataaaacacctttatatattaaaaccaaagagtgcatgttgggcttaatcgccaattatgcactctaaaacggataataaaggacaaccaattaatggttgccctgattatctaagaaaatagtttctatacttttcataaaatcattccaacatttttttaattttttctcgcaattgtttcatgcgctcttttttctgttgctgggtattttcaataacagatgtcaactcttcagaaggatttggggtcctaataacatttgttgtcttcattcttttttttcgattatatgatattgtggcacaaaatagaaataaatctcatatttacacaaccttatgttttttccttctgtttttaacattatgcaaaaaggtgggctgttggacaacccacctttgtacaatatgcaccatacccaaattacagccaagaacttgtaccttctcctgtaataatatcaaaaggattcaggttgtactctttcacaatatttgtatcgtcttgcttgctttccatgccatcttcattgaagatacatccctttaaagtaacggtttcagccgtccaatcagctcctgcatacgcattggtaaacgagataatcaaatcaaactcgcctaaatccatcagagaaccagccagcgctctcagttgtgaaaccgtgttgtagtccattgtgatagatgcagtgcaagtcttattaccaaaaccacggttaatggcattaccgccaattccatagttgttctcgattttacgaactttattccattttatttcagatactccttgcataatagtggagtcttcagaaatatccaaagctggtatggaaatgcgtatcattgaccagctatatgctacattattaattattgcttccatcttgtttattatttattggttagtgccaaaccttctattacttcaatacgagatgcaacgcctaccggaacaagtgaatatttaataatcagtgtatcgttcttcaatacattctgattcttgtcaattgtcaccgaaaaaccggaaatttcctcattggtttgcattgtgttgagaatgtcggaaacgatattttgaaacattgtaattttggctgaagataagtaaccggtagcgggatcaacttttaatggagagtgtacataaggcaacaaggcattgcgtacagcgcgtcttgacttatgaattgtacgatttctggcaactgtccggtaatctccattggagcatgtctggtcttttgagaaatatattccactttctaatcctgaatatttgcacaagaaaacataccccttatcatccaatgtatccagttgcattctgtttaaagaagaatactttaaagtgctggtcaattgctggccatcattcaatgcaacatcgccaaatcccatttcaatgtcagggaaatacccaatcagattaaatttgttaacccacgcaaatgactcttgcacgcttgccaaagctacacatccaagtgcagcaccaatatttcctacaggagttagatttgggttggcaagctgcattgctgacacatctttatctaacccttggctgagcaatactgtaacaaaacgggcatttgttatacaagtcggtatttttgccaattcgactttcttaacaggctcatcactggtagcgataaccgcagagtttgcgtttaacaagattgataaaggagcgttctcgtccgccaaagaagaggcttttgattgtaaatctgcaaccaaatcaatactatatgttcctgcttcagggtcagtttgcttccacaaagactgctctgtccacacaccaagttggttaatcataccgtgtgcggcatgttgcatctggtcaatagcattccaatcagcgccacaatttgcgaacattatgaataaacgtccattgtcaccctgtatgctgaagaaatgattgatatgatagtaaggcactccaaaaagtaaatcatttttaggatcatcagagggtgcagcaattcccaattccttcaaatcgtccatagaattgatttctataacattgccttgcaatttatcctttacagccaaacctgcaccttcttcaaagaatttagcttgtttggaaatatcgaacagcagccctgtgaccttctcagttgaagttgtagagtttgttccaatgttcccatcggtatcactcataaatacgccacctaatgccatatttgtaaattttattgtttgtaatacgggttttgataaagaatagcttctgtaaccaaattaggttgagtgtcttttgtgtacactcctcctttggcatcaatgtacagttcctggtaattagggaacttttgcaacaactgccttgttggttccgggacaggtgtagatgggagaatttcttccatatccgtgccttcatccggcagctcttcagtaaccattgtgctgtcactttcaatatctctttgttcctctacattgtcgcctgctgttgtttcgtttaaagtatccggtatatctggtgtgtttgtggtttcctgtgtttggacgttttcgtcttccggatcttgggtcttttttttacgtgccataactaaaaattaaaaaagggaatggagttttagctccactccctcgtgattaaaccatatataatatcagtcaactcgttattccgcattcttataagcagtccaggctacaatttcagccgggcgaacaatgtttacatccattttcatacgcatctggaagaaatagaactcactgttggcctgcaaacgctcaacctttactacttcggtgtcattggcatagtcaacacccatccataagttagattccataccggtagtaaactctccgagcaagatggtatgttccggaatacctacaatgggtacaatacgtttgcctttgaaacggtattcgttaaccttggtgttatcagagtatttcacttgcttgtcgctcagatattgatcgtacaggtcccaaatatcccagccacacacaaataccaaccctgctttcttacggatttgtttcgggcatttcttccacattgcgttgaaagcagcttctacattggcgccagtagtcaattctgtgttaccagcaataactacttgtccaccagccttttcagtttctgatgcattggacgaagtgtttgccaaaatacgtttgatagcaccgtcaaaatatttcatcggtccgcccgcattctcgccgcctatttctgtacaaccgcttggagctgtgattttagccgcttcttttccaccttttgcagaacaccaaatagattcaccgatatactcgttctttctgtccatcaaaagacggagcatttttgcctgtactttcgggtccagttcgcggaataccaggtttccatccggctgtgcaaaccgataatacttttcataatctctcggattaaattcgagatataccatgaactcctgcggttccaaataacgttctgtgaaagtgtattggttcaacccgcctgtagtccctgctcccgctccatgagtagaagtaggcgttggaacattgtcctggatcaccttacccaattgaactgatgggatggtgtatttaaactgaatgcctgatttgatatgaatcaaaccttccttgtatgtgtcgttgccttgcgctgtataggtcagtaaatcttcaaggacctcaccggaataagtgttttgcgcaaaatttacagaacttgccatgttttatattgtttgtgtttaatcaagtgttccaaatttgaaatcaggtccgactacagcttcaacagccttagccattttcttttctgcctcagtaatttgattttttgcattttctacattggcaggatcatttgctatttcagtagaaattttatcacgtttggggatggagttcaaggtctcttgtaccatctcaaaattgtttgctgccatttctacccatttagattttgcatcggggctaattttaccctcagaaattgcattttctacaaactgctcaatatccgctttatgttgcgcttcttcagcatctttgtaattttgcaactcttctttaaccgttgtcaattcattttgaacattggtaagttgcgcatccaccccttctttttgaattttcagagaatcgtatgaagcctgaatttctcttgctttcttttctgcattcttcaatgcgtcaatgcgagtaatgacagttgaaacttcagagtctttctccaaaccgagctgggcacatacagaaccaaatgcgaattcctgttctttgtccatcgtttcttttgaatttgaattgtttatttgattttgattaggaatagagtcggaaacgtcaagtggtttaaaatcttccaattctgcattaatagaagccattattttttgcagagcgcctgcttccacaactccttcaatttgatttttaactttagtgcaaacctgttttgatgtttttaggacgtggtccgccggcaatattccagcgctcacggcagatctcgcatcgaagtaagtaccgtcacacccctctttgccgtccataatctcccgtatcttttctttcgtcagaccaaatcgcttatggtagacagtttcgatctgcttttgaaaagcctttacgatttgttcgctgtcaggggaggcgttttcttcgcgtacaaatggattgtgaatcattaaaattgaataatcgcgcatgtaagaacgggtgccggcggcccataatacagaagccattgatgcagccattccttcaataatagtttcaacctcaatgggacattgttgtataatagagaaggttcccattccatacaatacgctcccgccttcgctattgatgctaatcacaattttagaaggcttcacatagtcctgaacccacaagaactcatcgttgaattgacgggtgctttcttcattgatacggccgtagaaacgcatatatactggctttgcctcttgcgcttccccaactacatattttaattcatctgttttcatttgagctttttcacaagaatagatgtctgcctatctaatggttgtgaatcctctaaaacacatcttttaagaaagtgattaatgaacctttcaacgattgatatataattgagaaacagtatgttttctgtaaaagagagcaagcattcgcctctgttccgacgatatttgaattcgctttttaaacgttatcttccggtagagtatttacagaaggctcaaattttgcaacctcttcaattttaggcttatcatgatccccatgcgcatctgtatcgtgttccggtgcgtctgaatggtttgtgaacggtggcatgaccaagtatctatccacccatttccggtactggaatgaagaggatgttctaaaccatatttcataatcaatccaatacggttgtaccccatgatccaaagattctggcatatcaaaataagtaaggttgcatcgttcgtttaacgctgcctcataatcttttgcgtcctgaatagcatcattaatctgttgaaaaacccgaaatccatgtgtttctacaacatcatccccattatttaaatcattaagtacgaatctaatacgcatggtggcgcgtccctctcctattcgttgctgggccaccaaataacgtacatttacaaatcggataaatgccgcaggaaaagctataccgtattctgtgttgccacgtgtgcggacaatacgttcaaactgtccgttatctatctttactgtccgaaacagtttgggggaactttcatcatctgggttggtgtgaagagattccaacacccgtctaacagccatatacacatcttccagcggattgttttccacttcttctaatgttgtattgtctttatcaacgagtgcggtagggcttttctctatcgtgtccgttaaattgtcttgtgtatttaatttatgtttttctactatcattttggaaagccatcaaaaatacgaatgctataagatgtaattttatcagctacggttgttgagtaacctataaattgtcttttcttaatgttatgtgctggagagccggatttggcaacttgtcctccttcattgtgtatagccgcataacagaaatttcttccatattgccttttactgaatcggaacatgtcagggtctgtaaaaattttaattccacggctattgctggagtgaaaacggtcccacacaatcgagtgcttgagtgttccagtttcttctaatatgggatggggcttatgatcgcttctgttttcccacgcaaacgtaccagcagaattaaatctacggagatagaaagaatccttaaatattttttttgcagcgttacctattaatgtttcaaagttaaatacattaacttcaaatctattaggaagggttagccactgttgagctaattgcttaggagttattgtttttccaaccattttccttttattctattagcaatggtgcgtaacttctttttatactttttcggaacactaaaatatgaatgagcactgctaaatatacgcccaccctttgcaacactttctttaaatacagggttgataaaatctggcatctcattgacttgtcccactacttgtgttaattgtgtacagttaaggacgcttgaagcctcttccaccaagaagcacctacacccatgttcaataggcggaattagccatgctgggaaattagcttttcgataactggttccctctaatgcaagatgccacgggcgtactctattatccccttgggtcatatatgtaagcacagtgttctcgctataagagacccatccagcagcaacccccatagcatactcaatgtctccattctctatagatgagtatatattattgtatcgataaaaaacactttcagcctctttaatatcttcttcgtcatcaatgtcaaggtcgtcggggaggttggcgaacatttgaaattcttcagctacagcaaagtcaacgagattgtccaaagctgctaccaacacattacgttgttctttctccatttttgtcagcccatcattatgattgcgaagtaaatccaatgccttttcaaagtccataccaaaacccttgattgcatggttaaatgcaaattcagaacgtaattccatcatttcttccagcaaatcccaacggttatccgcattgccgtaatcacgtaaaaatttttgaaagacagcatagatagcaagatattcagcgttatcttcatcttcagtggttgactcagattccgctgtgacggaagagaaaccgctatcctttattcctcttccgtcaaaaaattttcaaccttcctggtccgattaggtttttccccacgctggtatccgtatcttttataatactcttcatcagtcataatgtgtctgtcattagagtgtgcgccagtcatattgttaccgccaccaatcatttctgataaagcgttaaactgtttacccactacaatgccaaattctttttcaatttcatccgccgatacctcatatttatctgttataaaagaatataaactgattttatctttgttgctcatctctacccgattggcgtatttaaactccaagccagatttaatatatcccatatcaaccagacgtggaagaatctcttcattcataacattttcaatatattcccggtaaacctcaatccgttcccgaaaaatatcttggtgcgcattagtggaccccacataagattgtgtctctccagccattgaggaagaaccgacaattaaattggcaacttctttgtttacaaactcaataaggctactataaatatgctcagaattagacattgcaaaagtctttatgtccacttcgtcattcaggcctgtaacaacaattttattttgagcagcgttggctatactttgagccaatctttgtcggtcctgagtgctttcagactctgtcttaccgtgaatgataggctggccatatgtgtgtgagaaattcacatagttagctaatgtaaatttcttagccaatattaaaggggtagttgcagaaaacagccctaatgtccctgtattaataagaatatagttacaggaatattggtttgaggttatatcccaccccggcgtccattgcccctgccttttaacaaccctattttgattaggcaacacattacgtctttctatgatatttacttcagccaacttatttgttaacgggtttatcgtaggcataatttcgagcaaggtgtatccataccatttagactcaacaattcccttgattatctttgtaaattgagagccttgtatctttttggtttcttctacatcttttatatacttgccacgctcattctgtcgcgctaacatataacgctcacctatgatttgagattctacagtttccaatacagcacttaaatgtgcatcttgttgtacacatgcttcatataaatcaattaatggaccacggtcatccaaaacaacgccccgtgttacctgagattggacagatttatatctgcaatggcgatcaatctctcttacatattcttgaatcgtttttttactggtcctaaatatactctccagtggagtgccgcgaaaagttgtgtctgtgctaactatattcatactaagattttttgaaagaatagatagagaactgttagttggtttctatttctattcttctatcagtataaatgagttataatatataaaatataataatctatattatagatatttagatataaaatatatgttaaatacatgttttgtaataatcaatatgataaaaagaaatatatttgcatcgataatttaatgtctaacaataatacattattaaaatgagtaaaggttttaattattttcgtattaagatggcatacaaaggcaccaatgatcaaggagccattgttaccattaaatctgaggacctggtaatggctacatgctataccgaggcagaacaaatagcttataagttagcagaagggaaagatgaatttggagaagtggatatagaaattgtccgcactaaaattgcagaagttgcttacaacgacacttttgtcacagatacggaactaatatgcgggctaatatcatatttttttgaggaaagcgaagatacagaagtcggcttgtatcaagttgcacttgttttctacgatacggatgagaaatccggtaagacaaaaacatctaacagcactatttatgtaccggcatattcttcagccgaagctatagaaaatatccgaatatatttaaagcaggtgggtgaaactcgcgaatacaccattcgtaatgtcaaatatgataaggcgcaatcggttatggttacacccgaagttcataaaaacaatatcataccgtaatgacccttttaaaaggaaccgggaaaacaattgatataaaatgtacagaagtctcactcccggaattccctaatctcctttttggaactcattttgatggtagcagagtttttgatgctacatattatctacattttaaagaccccgacaacaaattaagtatagaagacttcttttataagtttgatttccagataaaggctattgccgagacttacaaattgcctttagataaactggtatcaatcaatacagaggggcatcaattgattagcggatgtttatgctatccgttcctatcttatgtggacccgcagttctgcgcatacatcaacgaagtgatagatgaaatgtttattaccggagttgtcgtatcagacacgcacttaatttcattagttaaaagaagactgccaccagaattgctaaaacaaatttgggatggcagagaaaatttttcgtgaacccaaagctgtattaatattcaactgtagaaagacattggtactggtagcgtcttctgtaaacgaagcagccaaaatcagtggcttgaagcctggtaacatatcaaaggcttgcgtgggcacattgatttccaatggtatgtattatttcagatatatagacagtgatattgaaatagaattatcagatataggttcattgaaattggatgagtatgacaagctatgtggcgttgaacgtcccatatatcccacaatggcaatgaaccgaagaaagtggaaatataataaaaataataacgtatgaaaataaaaatttacagtacatcaaagcatccgttgcctcaatacgcaacccaacaatcagcaggattggatttaagagcaaatattgattcttcagttaccataaatcctggagaaagagtgttggttccgacagggttacatatacagcttccgtatggttatgaagcgagaattcaaccgagaagcggactggcccttaaaaagggtattacttgtctcaattctccagggtgcgtggacgcagactatagaggagagataggaatcatacttattaatcatggaacagaaccgtttactgtcaatgatggagaacgcgttgcccaaatggttatctctaaatatgaacaggcagaatggaacccagtttcttcaatagaagatttggaagctacagagcgcgggacacaaggttttggtcatacaggaacagagtaatagaattgagggtacgcttcaaccttatgaagagtaccctcttgatatttataaacaaagcaataccctaaaagatatgagtaacgaaaataacatccaaattttcagcaacccccaatttggacaagtaagagttgctgtagatgaaaataacaagcctttattttgtctggctgatgtatgcaaggctttaggtttatctaatccaagccaggtaaaaaagagactaaaaagcaatggagtaagattaattgatttgcgtgccctatacgagaatgagggcatgataatcaatgagttgcaaaatacaaaagccacttttataaatgaagtcaacttatataagtgtgtgtttcaatcaagaaaaccagaagccgagaactttcaggactgggtatacggtgaagtgctgccatccattcacaagtatggtgcatatatgacgcaagacatacttcaaaaagccctaacctctccagattttttaatccaactggcaatccaactaaaagaagagcggcaaaaacgtgtggaggtggagcagaaaaacatggcattaattgaggccaacgattacaagaaatctgtaattgaggggttaaccgaagaaatacctcttgcggacatgagacaacgtataacccaaataatacgaaagggtggtcttgccggcataaaagaaggttattacctgctttattctgagtttgacaaaaaatttcatgttaatgttagtaccagaatgaacaatgtcttatattgcggttctaaaatggattacatagaaaaagagctaaagatgcttcctgagctatatgatttaacatgtaaattatttgaatcccaatacgaatctcttatgaaaaattgggggaaatctgtaaaacgtgctcaaggaagcagaaactaaaacagcggcattatgaaattaatagataaaataaaacactataatgaggcttaccgaaacggcgagcctttaatatctgattctgaatacgattctctgattgatgagttaaaaagaacagatcctaccaacgattggtttaaacatatagagccggcagcggtttcttgtaatagaaaacgttccctacctattcccatgaaatcactcaacaaagtgaaaagcatatccgaactaaagaagtggtgccaatctttaggattaaaaggaagtaccggcgtcgtatgtatgcccaaattcgacgggctttcgttactgcataatgaattgacaggagaagcgtattctcgtgggggtatagaaaatgagggacaagattgtaccagccattatcaagcatccgctcaatgttataatccaacaagtgattttcattatacatttggagaattcgttatcagtagagatgattgggaacgttttttcaacgggaagcgttctaaattcactggagacatctttaaatcaccgcgtaatacagcggccggacttttaaacagagatgaaccatgcgattacctccaacatgcttctttcttcagatatggagtagatgatggttccttacatgattataacaacttctacagcttgatagaaacaatttgcagtatatatcagcaagaacacctttatcatttcgcttttgtggatgaattgaacgaagacttgctgatgaacttattcaaagagtggagcaaaatatacccaattgacggtattgtaatttatattgatgatttacgtttatgggaagttattggcagacaccaaacttctggaaaccctttatacgccatagcttataaacaccctgattttacagaatcttttgaaacgacagtaaaggatattgcctggaaagtcagtaaggcgggtgctcttaaacctgtagtcaatattgaaatggttgatactggagattgtaatatggaaaaccctacaggatataatgccggatggatcaacgaccatgaaattgcaaaaggtgctaaaatattggttacccgctctggaggggtgattcccaaaattctatcgactatttctccggcaacacaggaagaacaagaaaagttatgggatgaaatggcggaatgtcctcattgtggagcaccaacaaattggaatgaaaatcgaatcgaattatgctgcaccaaccccaattgtccgggaatccagttggccaaaatagtattcttttatttaacgtgtggtgcggaaaatatgggagaagaaacattatccaagatttttaatgctgggtttacttctatatcagagattttaaatatcacttttgacgatttgataaaaatagaaggctttggagacaacatatcaaacactatactggaaaataacagaaaaatcatgcagggggttgatttagtcactttaatacaggcaagcgattgttttactggaattggaaaaataaaggcccaaaagatacttgatgaaatggatgctgaaaccagaaatgctttttatcaaaggcagtatgtatgtccgtcgcctaacacagaggcatttaatatcttatcaaaaacgatgcagtcattcaatcttggtgtttctccgtttttcaagtttttgacccaaactggtattcccattttacctccagtacagaaaactataaaccataatggtatatgcgcccatatgtctgtttgtatgtcggggtttagagacaatgatttggaagagtttatccaacagaacggtggtaatattgtaagcggtgtatctaaaaagacaacgcatttggtggtaaaagacaagtcggcaacttcctccaaaatttcaaaagctcaattgttggaaattcctatattatctatagaagagttttctaaatttatcggattttaaatatattgtattacagtttattagcgattaatattgatttatattgatattaatcgcttctaaatttgcataattaaattcaatgccatacttttgtaacaactaattaaatcaaatgagtatggcaaagaaaaatcaattgacaaaaagtgattatcttcctatggaggactacaaaaagctattgtaccttcttcataaagaccgtcaatatttgtgggagctatatgcccgattggcattctgtactgcactacgggtgtcagatatattacccctaacatggtccgacatactacataaaggatcgttaaccaaatccgaaaagaaaacaggcaaagtaagaaaaataccctttaacctgaatattcagacaaggatagaagaattgtacatgttgctcaagcgccctaaccctaatgaactaatatttaaaagtaaatttacgggcacctctatttccccacaatacttgaatcgaataatgaaagaatggaaaatcaagtacaaattgaatatagaaaatttttccacacatacttttcgcaaaacttttggaagatatgtttatgatacgagtgaaaacaaatcagaagcgctgttattattgaatagaatatttaatcactccagcgttgaaataaccaaagtttatatttgtatcaggaaagacgagataaattccatatttgattctatccgcttctaatatttcattttgatctgcacgttctgtgctcatatctgttttataacccattttaccaaactaacatgttttcaacccaaaaggacgcactgtcaatagtgccgcccataaccgttacttgcaaattttgtcatgcagaagaaaatattattgaatacgaccctcctggagagacccttctttttatgagtagagataatgtgtgtgctaagtgtgcctattggatggacaaaattaaacacccagacgttggacgtgaaataatcggaggacattattttatcgtacacccatttgtgaaacgccctaacaatgtaatcaaggggacagaaggaaaagagttttatattcgggaaaacgatggaacattaattaagtccaacaatgtatggtgtcaaggagaaatacctgtatatttcagaaatgagttgcaggatacagccaacttcctttcattaataacatacactaaactacacaatgaccctcatacatgttatgctaaaggatgctgggatagataccattgtcttaggtataatttagaatgtgaaagagatggtccctttaataaagttccggccaatcatattattggcagtgagaaatgcccatcatttataaacgtaaatgaattgaaaaccattatttaattagacataacgattatgaaatcattattaaaagacgaattggatcaaatgtgggagacctttgactataaatggtttgtctcaaacgatcccattcaaatgttacataagatacaacgtgttccagatagttctattgctgatattgaaatatgtgcaatgcttatagctatggtttcgtggggacaacccaatagtataatatatgcagctaatgtattgatgagccaatgtgagtggaaaccgtattattatatcaaatttggtgatttttatgacattccagacgaattgaatatttatcgtacacttactggaaaggcattcaaggaagtgtgtcatctgttgaggcgtttttatagtaggaattcatctgtcaaagaatacctcaaaaagcactctattacattcgatgatttactaatatcattatgtaatttgtatgagccagcgcgtcttggtagtccgtacagaaactctgcttgtatgcgtattaatatgttgttgcgctggatggttcgccaggatgagatagatttgggattatggcagactgatttcattaaaccagaaaatttgtatgccattatgtccccccatgttgcgcaacaggcacaacggatggggtttatatcctatcccaaagaaagctggaaggcggtcatggaattgacccatgtctatcgccaatgggatataaaagatcctttgaaatatgattttatactaacgactcaaaactttaaataatgattacaacattgcttattattatattggccactatattcattgttgccgtaacaattatagcagcacaaaataccgcttgtaaagattgtccttttagaaaaacatgtgatgagctactcaaccagaatcagcccaatctgtgtcagcaaaacgatatgccgcattcaaatgatggcaaataataaattaatgtacaatcaataaaaaacaaaagattatgaaaatagaaaacaaaaataaagtgtctgtagaggaaatgaaagcgtattatgcggaaaagtttccgtatgaagccaacaatcaacgtgtaggtcggtttgcgaaacagattgggtttcgactcaccaaacagatggttaaagggaagattattagtttttacataaaagatgaaacaagcaaatgagtacattttctgataaattcagcaaccactggaaatgtataccatacgcaatggccacactgacatccagtgacggttttatggttttgttccatctgctacgaagaggttatacaaatgagaacaagacgacatgtactatttccaataaagaattggcggaggttatgggaacttctgtcagttcgatacggcgtgccatagaaacattaaagaaactcaatctcattggttgttttcagaacaaagggacacaatgcacattctttataaattgggatgagatacaggctatacataaaataagttcgcaaatatcggataaagggtgggtgtatttgcgaggcttgtgcgtaaatggcgaggtacgtccaatttctgcgatacctatggatatattgaacgatgtagttcgtcaatatccacacacttcgctcaatatgaacacaccctcgctcaatatgaacacaccctcgctcaatatgaacacaccctcgctcaatatgaacacaccctcgctcaatatgagcggaccccctcaaatagatgaggaaaaagatgagagtatagaaaaactatcggaaaatatagattacaaacaacctaacctcgctcaatatgagcaggggtgtgttcaatatgagcaggggtccgctcaatatgaacgagggtgcgctcatattgaacaggggtgcgctcatattgaacaacagaataagatatatatagagaataaagaaaaagaaaacaataacgaacgaagtgagttaaataaagaggcaaataaaaaaatccttgaatggtttaattctcgtgacttgtctcttccagaaatttcttattccaattttgaaactattttggaaaatcctgattttgccgatacggattttgatatggcagtaagacaagtttggggatatttgcaatacgatgaagactcagtggataattatattccagccgaatatttcaaagatattctttatcgtgcttggaatgatttgaaaacggacaacccggctttctctctttcagagcaggacatgaagaatatttttggattcgagcttgaaatgaaaaatggagagcttgtatgctacatcactcccagcaagataaaagatataaccactcccctgcccacttccaggaaaataaaacgcaaaggagctgaggacaggctttccaggtttatgttcatcgagtcgcttgtggaagtgggacaaaaagacgttggcatgctgactgatgccgaatacgcgatatggcttatgattgagtttgtgaaagaaagggaaaacaagcaacagccacgcccatcagaagtaaccaaaatggtgtatgaagagttactggaacgtttttctcaggaatcaggtataccggtagaggaactgaagacattgtggaaagaacttccgcagaagagtatggtcaagttacatccgcagcagctctcagtggaaaaaataataaactacaatgtgcgggcaaatcaagcaagcgatgtggaagatgtctataacaaaaaaatggcaaaggcgctctcttaattgatttaattatatttaaaaaaatacataacgagcgaagctcgttcagggaaaggattataggatagggttaattaataataggggttctaagggggaagaagaaagaagggaaagggagaaagggaaacttccagcccccctttcttctatcttccaggctcggccaaaaaatttcttctgatttccatttcctcagataatatcctgactgcatcttcctcttttcggaaatagtttcctgccagatagcgcttatgactggtagcggttcccttttctgtatctgaagcaacactcatcttgtcggtaatataccagtacctctcccctttttcagctttcatgtttaaaggctctatccgtttcaggaaatggttccatgtctttccgaccttggccaactccacttccagaaattttctttgataatctgccggcttgaaagctgaaaatgaaaaatcatctacttttcccagatattcgttcatgctgtatcttaccggttctcctttgatagcatagcagtacataacgacatctccagttgatttgtctataagccgtagcactccgcacccttcctgtcccgtactgtggttatggaaggttatcaattcacatgatttggggatatatttatcgcttattaggaaaaagggatttccaaattccttcccgttttcagaaagaatcgaatagaggcgatttaagacactttcatcagcatgggtaatatcttgcacggaaacggatatttgattgaaaataggcgtgtttccgtccattctgaggcacattatagcggtatgtacatttccctcttgaattaaccccacagtgtccccccattttaccgcatctccagcaccaaaaccgttatcaaaccaatcagcaaaagttgcgtaatcaagagactccggatcatctgaataactggaaggaacatgcagcttgatattgaattctcccctacaatatgagcttatccctttaaagtccatctctgacctatattttctctttctcagaaaatgttcaacctgcttttttgtcttcatactttggattaaaaatcatttgttggcaaatatactatgatttttttgatgaacctcagcggtatataaaaaattgctttaaatgccataaaatgagactgaaaaatgggggtcggaaaaaatttcggaaattaatatatcgaatctttatataaatctgagattggatatattagatttggacggcttataaatacattaaaacgatatgtaatgggttaatataatggatgttgcaaaatagcgctctccagattcaatatattagtgatgaggtatgagaatttaaggagcaaatatattgtattgaatagtgatttctggaagagtgccagctcttgattatgtaaaatatttttaagaaaatcagattgaaaaaatgggacggattatatatatggtatccgcaccaaaacgtgggtgctctgccttattttttttcgtattttcacggcaaatacactgatttatagcatattacttgtttcactttcatgcaaaagtgaaacattatacgtttatcctgtttgtccaggtcgactatccccaggtatcagcagtttgtaatcattacaaatttgtattctttttgtgtgtgttgttcccgttcttttgtccagatataaggcagcttcttaaaaacaaacgtgcgtgtatatgtaataatatccatatacacgcacgttgtattattcctaatatattatataatttattctactttctttatttcaagtttagcgccgcaattagggcacgttattgtattattgtcggttgtatcctgtaataattcagatacagaaatgccgataatatttgcaatttcttttaatttgtctaatgatggattaccgttgattatttgggatacagtaggctgagtaatccctttccctccgtgcttgttagtcatttcggcggctaatctttcaagcgtccaacctttttccttaataactttctttatattcataattatatagtgtgtaaattatactacaaaggtactgttttttaatatataagctaaataaaataggatataatctatttattaacctttattataataattgccttataattacttcatgtgttaaatataggttaaatcatatattttattttgtggcataagatttaacctatatctttgcatcgtcaagttaagacaagcactacttgacaatgttctttaaataattgcaaaggttaacggcaaacctaaagccgttcatttagaccgcctccaatttgtaaaaggaggaaaagaaacaaaggttttttaagtgtgtgttctttgacttgttgaaagtaggttttataactgtgaaagtgcgaaactatcaaagtatgtatttgtttacggctatttgaaagcaagattttcaaatagttaggataatagttagtagtttagttactgaaagcaaacgaaagcaaacaagtatttgcgaacaattgaaagcgaaaagccgaaagtaatatacatttgttgtataaatgtaatgagtaagcgaaaagcaagtaaaaagcaagcaaaaaactatctgtaagtaagttgttagtaattgatagctaaatgaaaacgttatccagatacaaaggtagataaacggacgtaaattatctaaataagtttatttaatggttagataagttgttatttagctattaaatagtttatgcaattttatccgcaaagttcgccgtaataacttgtattttacaagtttagcgaattgtttagtagaagtagtggttataagtaacggaaaccaaaaagcgaaaatttacatttattgcaaaaatgcaaatgattagctatttgatagccaactgttaattagtattaattagcggaaagcctgatgtgtagttagtacgttcaatcctacaaacaaaagcactgaatttaaacaagttttacaacaagtttgtaaaattcagtgggcgtactatgtacttgtagagtgcattgtacctaaagcgtacataatggtacgttatgcgcaaagcgaatttgcggtccactacgattttataaactaattgtctaatttcaaaactgtaaattatggaaaactttgtaaaaacttcgtttgaactcgtgaatggtaatgtagtagctggtacaaaattaatggctcgtagcctggtgttattgaacgacaacggcgctatgtggaacgtaattgctaaagtgagaaataccgataaattctcggttcttcgtgcattgactaaagctgtacttgtagaattgcgtgaagttaataagaaaaattcaacagaagaggcgatagtaagcaaaaggcgtgtacaaaaaaaacttgctccggctttatcttgtcatattgcaatggtgactgacaagaacggtgatattattccgggttcaggactctctgtaagggaaagcgaaaaagatacggacaaattgcgcgatattatccgtatttcaaagggaatgcctatttacaaacttgttgtagaacaagggttagattggtctgaggaaagcgttgtaagcgcattgaatatgtatgtgactgcaacaatccaacaaatgaactatgtaaaagatttggatgccgctttaggtgctgccgctgatagcacggaaaaagaagaaaaggcggcagaagcagctacaaagaaagtatcttctaaaaccgtaaaagaagaaaaggcggcagaagcagctacaaagaaagtatcttctaaaaccgtaaaagaagaaaaggcggcggcataatatggaatttggtgcggacatatcgttgatagtgatgtgtccgcactttatttggtgctacactgagaaagtgtcggaaagcgtggtaacgatgccagtaaccgcattaagcctccctgaaagtgaaggacggcgaacgtatgaaagtataagcgcaagagggttcgactccctccagctccactactataaaactttattcaaatgcctaaattagcagatttattgtgtcaaagcgtaaacaatagtagcgactttggcagcgattggtatgttcgttttgcatataacttacacatggatataactaaagcgcaaaaaatatttagcgcttatggtttaggacacatctattctcctactggttttgtgatgcctgacacaccatatcaaagacgtaagatggtggcgaattttggagcgtgcgtagtcgtaacctctgacggtaatatgtggcttcgcaccccagaacaaatcggtgctaaaaaccggaaaaaggcaaaacgtttaaagaatgtcgaatataggaaaatgctcaaaaacgaacagaacctttatgaagaaaagcggattagccgtctgtttaaagaagggcagactaccccatcacccaaacgtggcggtaaggcgaacagtcattatgatatagggaaatatataagttttcctggagagcgtatagacaagatggagcctaaaaacataaatagatttatacaatttaggattgacatttaatcaaggacgaattttgtaaacatggcatgtgctggagtaaataacggtgcatgccatttttgtatctgattataaacccttaaaaacaataagatatgaaacgagtaagaataccaagaacaagcgcaaaaatcatttcaacttctggtgtaaatatgacattctatttgcctaaatcacaaaatgttactgtaagaagaaagaacatatatgacttatttaaagcgtagtcgcatgaaaaggcatattgtggtatacaagcgaaaaaagtacataaaggtggctactgcaatcggtagccaattttatagaattgcggtagcaggttgccttctgatttcttgtgtttcaatgatatttttaaacatacattaagcgtaaagacgatggaaaagaatgatgtagccagctttttctactatatgtggaactgttggtgcgaacaggaatgtgaaacggcttttacccgttccggttgcgggtggcggcatctttggaacaaatggtgccagtacagttcaaagcaccaggggtttggtgctgccgaagaatttttcgcaaatctgagtgaagataatcaggacttgctggtgaagcgtgcgttggaattgtatgaccggagaaagacaagataatggtacggtatttaaagatagcattcggactggtggtggtgtgcctggtatttcgggcatgtaggcttgaatatgtctgcaatatagttgactctatcccagttgaaatcagagaaagaataatagaggagcgtccggaatgtacggatattggcgtacttgctgatttctgggttagcaagggggactctgtagtagaggaagtggcggaagaacaggcgtatgaacgcgaattggaacaatatatcaaataattcaagagtatggaaacaaagaaatgtaaggcttgcggaaaagaacttccgctatcggaatttggcaaaaacaaatccattaaagatgggcatgacaacaagtgtaaatcatgccgcaaaaaattgcgggagaactcttccggtggtgtcacccagcaaggtgtaaaggctacgttaaagatgtccgattttgaagacaatatgctgtttgctgagttgcgcagacgtggatataccggagaactgcgctattccaaagttataaatgtatagttatgtacacaagtcatggctgggagctggacaatttattgcaggggcaaaacgaagaatatctccttgaaatattaatggaaaattataagcgcctgagggatgttccggacaatctgattatgacgttgcttgaatatcgcggatataccggaaagttggtgcaggtagaaaacaaaatataaggaagcatgatagcggaagttatagaacaaatgcgaaaagagttgtatgatactcacttttgcatatctgattttgagaaatatgatttgaaagaacttgaaa
